United States Patent Application Publication US 2023/0074280 A1 - sequence listing, part 2

SEQ ID NO: 18924 - RNA, 21 nt, synthetic construct
  source 1..21: mol_type = other RNA; note = Description of Artificial Sequence: Synthetic oligonucleotide
aaatctagttagacaattatt

SEQ ID NO: 18925 - RNA, 21 nt, synthetic construct
  source 1..21: mol_type = other RNA; note = Description of Artificial Sequence: Synthetic oligonucleotide
aatctagttagacaatttatt

SEQ ID NO: 18926 - RNA, 21 nt, synthetic construct
  source 1..21: mol_type = other RNA; note = Description of Artificial Sequence: Synthetic oligonucleotide
atctagttagacaatttgatt

SEQ ID NO: 18927 - RNA, 21 nt, synthetic construct
  source 1..21: mol_type = other RNA; note = Description of Artificial Sequence: Synthetic oligonucleotide
tctagttagacaatttgcatt

SEQ ID NO: 18928 - RNA, 21 nt, synthetic construct
  source 1..21: mol_type = other RNA; note = Description of Artificial Sequence: Synthetic oligonucleotide
ctagttagacaatttgcaatt

SEQ ID NO: 18929 - RNA, 21 nt, synthetic construct
  source 1..21: mol_type = other RNA; note = Description of Artificial Sequence: Synthetic oligonucleotide
tagttagacaatttgcacatt

SEQ ID NO: 18930 - RNA, 21 nt, synthetic construct
  source 1..21: mol_type = other RNA; note = Description of Artificial Sequence: Synthetic oligonucleotide
agttagacaatttgcacaatt

SEQ ID NO: 18931 - RNA, 21 nt, synthetic construct
  source 1..21: mol_type = other RNA; note = Description of Artificial Sequence: Synthetic oligonucleotide
gttagacaatttgcacacatt

SEQ ID NO: 18932 - RNA, 21 nt, synthetic construct
  source 1..21: mol_type = other RNA; note = Description of Artificial Sequence: Synthetic oligonucleotide
ttagacaatttgcacacaatt

SEQ ID NO: 18933 - RNA, 21 nt, synthetic construct
  source 1..21: mol_type = other RNA; note = Description of Artificial Sequence: Synthetic oligonucleotide
tagacaatttgcacacatatt

SEQ ID NO: 18934 - RNA, 21 nt, synthetic construct
  source 1..21: mol_type = other RNA; note = Description of Artificial Sequence: Synthetic oligonucleotide
agacaatttgcacacataatt

SEQ ID NO: 18935 - RNA, 21 nt, synthetic construct
  source 1..21: mol_type = other RNA; note = Description of Artificial Sequence: Synthetic oligonucleotide
gacaatttgcacacatacatt

SEQ ID NO: 18936 - RNA, 21 nt, synthetic construct
  source 1..21: mol_type = other RNA; note = Description of Artificial Sequence: Synthetic oligonucleotide
acaatttgcacacatactatt

SEQ ID NO: 18937 - RNA, 21 nt, synthetic construct
  source 1..21: mol_type = other RNA; note = Description of Artificial Sequence: Synthetic oligonucleotide
caatttgcacacatacttatt

SEQ ID NO: 18938 - RNA, 21 nt, synthetic construct
  source 1..21: mol_type = other RNA; note = Description of Artificial Sequence: Synthetic oligonucleotide
aatttgcacacatactttatt

SEQ ID NO: 18939 - RNA, 21 nt, synthetic construct
  source 1..21: mol_type = other RNA; note = Description of Artificial Sequence: Synthetic oligonucleotide
atttgcacacatacttttatt

SEQ ID NO: 18940 - RNA, 21 nt, synthetic construct
  source 1..21: mol_type = other RNA; note = Description of Artificial Sequence: Synthetic oligonucleotide
tttgcacacatacttttcatt

SEQ ID NO: 18941 - RNA, 21 nt, synthetic construct
  source 1..21: mol_type = other RNA; note = Description of Artificial Sequence: Synthetic oligonucleotide
ttgcacacatacttttctatt

SEQ ID NO: 18942 - RNA, 21 nt, synthetic construct
  source 1..21: mol_type = other RNA; note = Description of Artificial Sequence: Synthetic oligonucleotide
tgcacacatacttttctaatt

SEQ ID NO: 18943 - RNA, 21 nt, synthetic construct
  source 1..21: mol_type = other RNA; note = Description of Artificial Sequence: Synthetic oligonucleotide
gcacacatacttttctaaatt

SEQ ID NO: 18944 - RNA, 21 nt, synthetic construct
  source 1..21: mol_type = other RNA; note = Description of Artificial Sequence: Synthetic oligonucleotide
cacacatacttttctaagatt

SEQ ID NO: 18945 - RNA, 21 nt, synthetic construct
  source 1..21: mol_type = other RNA; note = Description of Artificial Sequence: Synthetic oligonucleotide
acacatacttttctaaggatt

SEQ ID NO: 18946 - RNA, 21 nt, synthetic construct
  source 1..21: mol_type = other RNA; note = Description of Artificial Sequence: Synthetic oligonucleotide
cacatacttttctaagggatt

SEQ ID NO: 18947 - RNA, 21 nt, synthetic construct
  source 1..21: mol_type = other RNA; note = Description of Artificial Sequence: Synthetic oligonucleotide
acatacttttctaagggaatt

SEQ ID NO: 18948 - RNA, 21 nt, synthetic construct
  source 1..21: mol_type = other RNA; note = Description of Artificial Sequence: Synthetic oligonucleotide
catacttttctaagggacatt

SEQ ID NO: 18949 - RNA, 21 nt, synthetic construct
  source 1..21: mol_type = other RNA; note = Description of Artificial Sequence: Synthetic oligonucleotide
atacttttctaagggacaatt

SEQ ID NO: 18950 - RNA, 21 nt, synthetic construct
  source 1..21: mol_type = other RNA; note = Description of Artificial Sequence: Synthetic oligonucleotide
tacttttctaagggacatatt

SEQ ID NO: 18951 - RNA, 21 nt, synthetic construct
  source 1..21: mol_type = other RNA; note = Description of Artificial Sequence: Synthetic oligonucleotide
acttttctaagggacattatt

SEQ ID NO: 18952 - RNA, 21 nt, synthetic construct
  source 1..21: mol_type = other RNA; note = Description of Artificial Sequence: Synthetic oligonucleotide
cttttctaagggacattaatt

SEQ ID NO: 18953 - RNA, 21 nt, synthetic construct
  source 1..21: mol_type = other RNA; note = Description of Artificial Sequence: Synthetic oligonucleotide
ttttctaagggacattatatt

SEQ ID NO: 18954 - RNA, 21 nt, synthetic construct
  source 1..21: mol_type = other RNA; note = Description of Artificial Sequence: Synthetic oligonucleotide
tttctaagggacattatcatt

SEQ ID NO: 18955 - RNA, 21 nt, synthetic construct
  source 1..21: mol_type = other RNA; note = Description of Artificial Sequence: Synthetic oligonucleotide
ttctaagggacattatctatt

SEQ ID NO: 18956 - RNA, 21 nt, synthetic construct
  source 1..21: mol_type = other RNA; note = Description of Artificial Sequence: Synthetic oligonucleotide
tctaagggacattatcttatt

SEQ ID NO: 18957 - RNA, 21 nt, synthetic construct
  source 1..21: mol_type = other RNA; note = Description of Artificial Sequence: Synthetic oligonucleotide
ctaagggacattatcttcatt

SEQ ID NO: 18958 - RNA, 21 nt, synthetic construct
  source 1..21: mol_type = other RNA; note = Description of Artificial Sequence: Synthetic oligonucleotide
taagggacattatcttccatt

SEQ ID NO: 18959 - RNA, 21 nt, synthetic construct
  source 1..21: mol_type = other RNA; note = Description of Artificial Sequence: Synthetic oligonucleotide
aagggacattatcttcctatt

SEQ ID NO: 18960 - RNA, 21 nt, synthetic construct
  source 1..21: mol_type = other RNA; note = Description of Artificial Sequence: Synthetic oligonucleotide
agggacattatcttccttatt

SEQ ID NO: 18961 - RNA, 21 nt, synthetic construct
  source 1..21: mol_type = other RNA; note = Description of Artificial Sequence: Synthetic oligonucleotide
gggacattatcttccttcatt

SEQ ID NO: 18962 - RNA, 21 nt, synthetic construct
  source 1..21: mol_type = other RNA; note = Description of Artificial Sequence: Synthetic oligonucleotide
ggacattatcttccttcaatt

SEQ ID NO: 18963 - RNA, 21 nt, synthetic construct
  source 1..21: mol_type = other RNA; note = Description of Artificial Sequence: Synthetic oligonucleotide
gacattatcttccttcagatt

SEQ ID NO: 18964 - RNA, 21 nt, synthetic construct
  source 1..21: mol_type = other RNA; note = Description of Artificial Sequence: Synthetic oligonucleotide
acattatcttccttcaggatt

SEQ ID NO: 18965 - RNA, 21 nt, synthetic construct
  source 1..21: mol_type = other RNA; note = Description of Artificial Sequence: Synthetic oligonucleotide
cattatcttccttcaggtatt

SEQ ID NO: 18966 - RNA, 21 nt, synthetic construct
  source 1..21: mol_type = other RNA; note = Description of Artificial Sequence: Synthetic oligonucleotide
attatcttccttcaggttatt

SEQ ID NO: 18967 - RNA, 21 nt, synthetic construct
  source 1..21: mol_type = other RNA; note = Description of Artificial Sequence: Synthetic oligonucleotide
ttatcttccttcaggtttatt

SEQ ID NO: 18968 - RNA, 21 nt, synthetic construct
  source 1..21: mol_type = other RNA; note = Description of Artificial Sequence: Synthetic oligonucleotide
tatcttccttcaggttttatt

SEQ ID NO: 18969 - RNA, 21 nt, synthetic construct
  source 1..21: mol_type = other RNA; note = Description of Artificial Sequence: Synthetic oligonucleotide
atcttccttcaggtttttatt

SEQ ID NO: 18970 - RNA, 21 nt, synthetic construct
  source 1..21: mol_type = other RNA; note = Description of Artificial Sequence: Synthetic oligonucleotide
tcttccttcaggtttttaatt

SEQ ID NO: 18971 - RNA, 21 nt, synthetic construct
  source 1..21: mol_type = other RNA; note = Description of Artificial Sequence: Synthetic oligonucleotide
cttccttcaggtttttacatt

SEQ ID NO: 18972 - RNA, 21 nt, synthetic construct
  source 1..21: mol_type = other RNA; note = Description of Artificial Sequence: Synthetic oligonucleotide
ttccttcaggtttttaccatt

SEQ ID NO: 18973 - RNA, 21 nt, synthetic construct
  source 1..21: mol_type = other RNA; note = Description of Artificial Sequence: Synthetic oligonucleotide
tccttcaggtttttacctatt

SEQ ID NO: 18974 - RNA, 21 nt, synthetic construct
  source 1..21: mol_type = other RNA; note = Description of Artificial Sequence: Synthetic oligonucleotide
ccttcaggtttttacctcatt

SEQ ID NO: 18975 - RNA, 21 nt, synthetic construct
  source 1..21: mol_type = other RNA; note = Description of Artificial Sequence: Synthetic oligonucleotide
cttcaggtttttacctccatt

SEQ ID NO: 18976 - RNA, 21 nt, synthetic construct
  source 1..21: mol_type = other RNA; note = Description of Artificial Sequence: Synthetic oligonucleotide
ttcaggtttttacctccaatt

SEQ ID NO: 18977 - RNA, 21 nt, synthetic construct
  source 1..21: mol_type = other RNA; note = Description of Artificial Sequence: Synthetic oligonucleotide
tcaggtttttacctccacatt

SEQ ID NO: 18978 - RNA, 21 nt, synthetic construct
  source 1..21: mol_type = other RNA; note = Description of Artificial Sequence: Synthetic oligonucleotide
caggtttttacctccactatt

SEQ ID NO: 18979 - RNA, 21 nt, synthetic construct
  source 1..21: mol_type = other RNA; note = Description of Artificial Sequence: Synthetic oligonucleotide
aggtttttacctccactcatt

SEQ ID NO: 18980 - RNA, 21 nt, synthetic construct
  source 1..21: mol_type = other RNA; note = Description of Artificial Sequence: Synthetic oligonucleotide
ggtttttacctccactcaatt

SEQ ID NO: 18981 - RNA, 21 nt, synthetic construct
  source 1..21: mol_type = other RNA; note = Description of Artificial Sequence: Synthetic oligonucleotide
gtttttacctccactcatatt

SEQ ID NO: 18982 - RNA, 21 nt, synthetic construct
  source 1..21: mol_type = other RNA; note = Description of Artificial Sequence: Synthetic oligonucleotide
tttttacctccactcatcatt

SEQ ID NO: 18983 - RNA, 21 nt, synthetic construct
  source 1..21: mol_type = other RNA; note = Description of Artificial Sequence: Synthetic oligonucleotide
ttttacctccactcatccatt

SEQ ID NO: 18984 - RNA, 21 nt, synthetic construct
  source 1..21: mol_type = other RNA; note = Description of Artificial Sequence: Synthetic oligonucleotide
tttacctccactcatcctatt

SEQ ID NO: 18985 - RNA, 21 nt, synthetic construct
  source 1..21: mol_type = other RNA; note = Description of Artificial Sequence: Synthetic oligonucleotide
ttacctccactcatccttatt

SEQ ID NO: 18986 - RNA, 21 nt, synthetic construct
  source 1..21: mol_type = other RNA; note = Description of Artificial Sequence: Synthetic oligonucleotide
tacctccactcatccttaatt

SEQ ID NO: 18987 - RNA, 21 nt, synthetic construct
  source 1..21: mol_type = other RNA; note = Description of Artificial Sequence: Synthetic oligonucleotide
acctccactcatccttagatt

SEQ ID NO: 18988 - RNA, 21 nt, synthetic construct
  source 1..21: mol_type = other RNA; note = Description of Artificial Sequence: Synthetic oligonucleotide
cctccactcatccttagaatt

SEQ ID NO: 18989 - RNA, 21 nt, synthetic construct
  source 1..21: mol_type = other RNA; note = Description of Artificial Sequence: Synthetic oligonucleotide
ctccactcatccttagagatt

SEQ ID NO: 18990 - RNA, 21 nt, synthetic construct
  source 1..21: mol_type = other RNA; note = Description of Artificial Sequence: Synthetic oligonucleotide
tccactcatccttagagcatt

SEQ ID NO: 18991 - RNA, 21 nt, synthetic construct
  source 1..21: mol_type = other RNA; note = Description of Artificial Sequence: Synthetic oligonucleotide
ccactcatccttagagccatt

SEQ ID NO: 18992 - RNA, 21 nt, synthetic construct
  source 1..21: mol_type = other RNA; note = Description of Artificial Sequence: Synthetic oligonucleotide
cactcatccttagagcccatt

SEQ ID NO: 18993 - RNA, 21 nt, synthetic construct
  source 1..21: mol_type = other RNA; note = Description of Artificial Sequence: Synthetic oligonucleotide
actcatccttagagcccaatt

SEQ ID NO: 18994 - RNA, 21 nt, synthetic construct
  source 1..21: mol_type = other RNA; note = Description of Artificial Sequence: Synthetic oligonucleotide
ctcatccttagagcccacatt

SEQ ID NO: 18995 - RNA, 21 nt, synthetic construct
  source 1..21: mol_type = other RNA; note = Description of Artificial Sequence: Synthetic oligonucleotide
tcatccttagagcccactatt

SEQ ID NO: 18996 - RNA, 21 nt, synthetic construct
  source 1..21: mol_type = other RNA; note = Description of Artificial Sequence: Synthetic oligonucleotide
catccttagagcccactgatt

SEQ ID NO: 18997 - RNA, 21 nt, synthetic construct
  source 1..21: mol_type = other RNA; note = Description of Artificial Sequence: Synthetic oligonucleotide
atccttagagcccactgaatt

SEQ ID NO: 18998 - RNA, 21 nt, synthetic construct
  source 1..21: mol_type = other RNA; note = Description of Artificial Sequence: Synthetic oligonucleotide
tccttagagcccactgacatt

SEQ ID NO: 18999 - RNA, 21 nt, synthetic construct
  source 1..21: mol_type = other RNA; note = Description of Artificial Sequence: Synthetic oligonucleotide
ccttagagcccactgactatt

SEQ ID NO: 19000 - RNA, 21 nt, synthetic construct
  source 1..21: mol_type = other RNA; note = Description of Artificial Sequence: Synthetic oligonucleotide
cttagagcccactgactgatt

SEQ ID NO: 19001 - RNA, 21 nt, synthetic construct
  source 1..21: mol_type = other RNA; note = Description of Artificial Sequence: Synthetic oligonucleotide
ttagagcccactgactgcatt

SEQ ID NO: 19002 - RNA, 21 nt, synthetic construct
  source 1..21: mol_type = other RNA; note = Description of Artificial Sequence: Synthetic oligonucleotide
tagagcccactgactgctatt

SEQ ID NO: 19003 - RNA, 21 nt, synthetic construct
  source 1..21: mol_type = other RNA; note = Description of Artificial Sequence: Synthetic oligonucleotide
agagcccactgactgctcatt

SEQ ID NO: 19004 - RNA, 21 nt, synthetic construct
  source 1..21: mol_type = other RNA; note = Description of Artificial Sequence: Synthetic oligonucleotide
gagcccactgactgctccatt

SEQ ID NO: 19005 - RNA, 21 nt, synthetic construct
  source 1..21: mol_type = other RNA; note = Description of Artificial Sequence: Synthetic oligonucleotide
agcccactgactgctcccatt

SEQ ID NO: 19006 - RNA, 21 nt, synthetic construct
  source 1..21: mol_type = other RNA; note = Description of Artificial Sequence: Synthetic oligonucleotide
gcccactgactgctccccatt

SEQ ID NO: 19007 - RNA, 21 nt, synthetic construct
  source 1..21: mol_type = other RNA; note = Description of Artificial Sequence: Synthetic oligonucleotide
cccactgactgctcccctatt

SEQ ID NO: 19008 - RNA, 21 nt, synthetic construct
  source 1..21: mol_type = other RNA; note = Description of Artificial Sequence: Synthetic oligonucleotide
ccactgactgctccccttatt

SEQ ID NO: 19009 - RNA, 21 nt, synthetic construct
  source 1..21: mol_type = other RNA; note = Description of Artificial Sequence: Synthetic oligonucleotide
cactgactgctcccctttatt

SEQ ID NO: 19010 - RNA, 21 nt, synthetic construct
  source 1..21: mol_type = other RNA; note = Description of Artificial Sequence: Synthetic oligonucleotide
actgactgctcccctttaatt

SEQ ID NO: 19011 - RNA, 21 nt, synthetic construct
  source 1..21: mol_type = other RNA; note = Description of Artificial Sequence: Synthetic oligonucleotide
ctgactgctcccctttatatt

SEQ ID NO: 19012 - RNA, 21 nt, synthetic construct
  source 1..21: mol_type = other RNA; note = Description of Artificial Sequence: Synthetic oligonucleotide
tgactgctcccctttataatt

SEQ ID NO: 19013 - RNA, 21 nt, synthetic construct
  source 1..21: mol_type = other RNA; note = Description of Artificial Sequence: Synthetic oligonucleotide
gactgctcccctttatacatt

SEQ ID NO: 19014 - RNA, 21 nt, synthetic construct
  source 1..21: mol_type = other RNA; note = Description of Artificial Sequence: Synthetic oligonucleotide
actgctcccctttataccatt

SEQ ID NO: 19015 - RNA, 21 nt, synthetic construct
  source 1..21: mol_type = other RNA; note = Description of Artificial Sequence: Synthetic oligonucleotide
ctgctcccctttatacctatt

SEQ ID NO: 19016 - RNA, 21 nt, synthetic construct
  source 1..21: mol_type = other RNA; note = Description of Artificial Sequence: Synthetic oligonucleotide
tgctcccctttatacctgatt

SEQ ID NO: 19017 - RNA, 21 nt, synthetic construct
  source 1..21: mol_type = other RNA; note = Description of Artificial Sequence: Synthetic oligonucleotide
gctcccctttatacctgtatt

SEQ ID NO: 19018 - RNA, 21 nt, synthetic construct
  source 1..21: mol_type = other RNA; note = Description of Artificial Sequence: Synthetic oligonucleotide
ctcccctttatacctgttatt

SEQ ID NO: 19019 - RNA, 21 nt, synthetic construct
  source 1..21: mol_type = other RNA; note = Description of Artificial Sequence: Synthetic oligonucleotide
tcccctttatacctgttgatt

SEQ ID NO: 19020 - RNA, 21 nt, synthetic construct
  source 1..21: mol_type = other RNA; note = Description of Artificial Sequence: Synthetic oligonucleotide
cccctttatacctgttggatt

SEQ ID NO: 19021 - RNA, 21 nt, synthetic construct
  source 1..21: mol_type = other RNA; note = Description of Artificial Sequence: Synthetic oligonucleotide
ccctttatacctgttggcatt

SEQ ID NO: 19022 - RNA, 21 nt, synthetic construct
  source 1..21: mol_type = other RNA; note = Description of Artificial Sequence: Synthetic oligonucleotide
cctttatacctgttggccatt

SEQ ID NO: 19023 - RNA, 21 nt, synthetic construct
  source 1..21: mol_type = other RNA; note = Description of Artificial Sequence: Synthetic oligonucleotide
ctttatacctgttggcccatt

SEQ ID NO: 19024 - RNA, 21 nt, synthetic construct
  source 1..21: mol_type = other RNA; note = Description of Artificial Sequence: Synthetic oligonucleotide
tttatacctgttggccctatt

SEQ ID NO: 19025 - RNA, 21 nt, synthetic construct
  source 1..21: mol_type = other RNA; note = Description of Artificial Sequence: Synthetic oligonucleotide
ttatacctgttggccctgatt

SEQ ID NO: 19026 - RNA, 21 nt, synthetic construct
  source 1..21: mol_type = other RNA; note = Description of Artificial Sequence: Synthetic oligonucleotide
tatacctgttggccctgcatt

SEQ ID NO: 19027 - RNA, 21 nt, synthetic construct
  source 1..21: mol_type = other RNA; note = Description of Artificial Sequence: Synthetic oligonucleotide
atacctgttggccctgccatt

SEQ ID NO: 19028 - RNA, 21 nt, synthetic construct
  source 1..21: mol_type = other RNA; note = Description of Artificial Sequence: Synthetic oligonucleotide
tacctgttggccctgcctatt

SEQ ID NO: 19029 - RNA, 21 nt, synthetic construct
  source 1..21: mol_type = other RNA; note = Description of Artificial Sequence: Synthetic oligonucleotide
acctgttggccctgcctaatt

SEQ ID NO: 19030 - RNA, 21 nt, synthetic construct
  source 1..21: mol_type = other RNA; note = Description of Artificial Sequence: Synthetic oligonucleotide
cctgttggccctgcctatatt

SEQ ID NO: 19031 - RNA, 21 nt, synthetic construct
  source 1..21: mol_type = other RNA; note = Description of Artificial Sequence: Synthetic oligonucleotide
ctgttggccctgcctataatt

SEQ ID NO: 19032 - RNA, 21 nt, synthetic construct
  source 1..21: mol_type = other RNA; note = Description of Artificial Sequence: Synthetic oligonucleotide
tgttggccctgcctatagatt

SEQ ID NO: 19033 - RNA, 21 nt, synthetic construct
  source 1..21: mol_type = other RNA; note = Description of Artificial Sequence: Synthetic oligonucleotide
gttggccctgcctataggatt

SEQ ID NO: 19034 - RNA, 21 nt, synthetic construct
  source 1..21: mol_type = other RNA; note = Description of Artificial Sequence: Synthetic oligonucleotide
ttggccctgcctataggaatt

SEQ ID NO: 19035 - RNA, 21 nt, synthetic construct
  source 1..21: mol_type = other RNA; note = Description of Artificial Sequence: Synthetic oligonucleotide
tggccctgcctataggagatt

SEQ ID NO: 19036 - RNA, 21 nt, synthetic construct
  source 1..21: mol_type = other RNA; note = Description of Artificial Sequence: Synthetic oligonucleotide
ggccctgcctataggagaatt

SEQ ID NO: 19037 - RNA, 21 nt, synthetic construct
  source 1..21: mol_type = other RNA; note = Description of Artificial Sequence: Synthetic oligonucleotide
gccctgcctataggagagatt

SEQ ID NO: 19038 - RNA, 21 nt, synthetic construct
  source 1..21: mol_type = other RNA; note = Description of Artificial Sequence: Synthetic oligonucleotide
ccctgcctataggagagaatt

SEQ ID NO: 19039 - RNA, 21 nt, synthetic construct
  source 1..21: mol_type = other RNA; note = Description of Artificial Sequence: Synthetic oligonucleotide
cctgcctataggagagaaatt

SEQ ID NO: 19040 - RNA, 21 nt, synthetic construct
  source 1..21: mol_type = other RNA; note = Description of Artificial Sequence: Synthetic oligonucleotide
ctgcctataggagagaatatt

SEQ ID NO: 19041 - RNA, 21 nt, synthetic construct
  source 1..21: mol_type = other RNA; note = Description of Artificial Sequence: Synthetic oligonucleotide
tgcctataggagagaataatt

SEQ ID NO: 19042 - RNA, 21 nt, synthetic construct
  source 1..21: mol_type = other RNA; note = Description of Artificial Sequence: Synthetic oligonucleotide
gcctataggagagaatatatt

SEQ ID NO: 19043 - RNA, 21 nt, synthetic construct
  source 1..21: mol_type = other RNA; note = Description of Artificial Sequence: Synthetic oligonucleotide
cctataggagagaatattatt

SEQ ID NO: 19044 - RNA, 21 nt, synthetic construct
  source 1..21: mol_type = other RNA; note = Description of Artificial Sequence: Synthetic oligonucleotide
ctataggagagaatatttatt

SEQ ID NO: 19045 - RNA, 21 nt, synthetic construct
  source 1..21: mol_type = other RNA; note = Description of Artificial Sequence: Synthetic oligonucleotide
tataggagagaatatttgatt

SEQ ID NO: 19046 - RNA, 21 nt, synthetic construct
  source 1..21: mol_type = other RNA; note = Description of Artificial Sequence: Synthetic oligonucleotide
ataggagagaatatttggatt

SEQ ID NO: 19047 - RNA, 21 nt, synthetic construct
  source 1..21: mol_type = other RNA; note = Description of Artificial Sequence: Synthetic oligonucleotide
taggagagaatatttggaatt

SEQ ID NO: 19048 - RNA, 21 nt, synthetic construct
  source 1..21: mol_type = other RNA; note = Description of Artificial Sequence: Synthetic oligonucleotide
aggagagaatatttggagatt

SEQ ID NO: 19049 - RNA, 21 nt, synthetic construct
  source 1..21: mol_type = other RNA; note = Description of Artificial Sequence: Synthetic oligonucleotide
ggagagaatatttggagaatt

SEQ ID NO: 19050 - RNA, 21 nt, synthetic construct
  source 1..21: mol_type = other RNA; note = Description of Artificial Sequence: Synthetic oligonucleotide
gagagaatatttggagatatt

SEQ ID NO: 19051 - RNA, 21 nt, synthetic construct
  source 1..21: mol_type = other RNA; note = Description of Artificial Sequence: Synthetic oligonucleotide
agagaatatttggagataatt

SEQ ID NO: 19052 - RNA, 21 nt, synthetic construct
  source 1..21: mol_type = other RNA; note = Description of Artificial Sequence: Synthetic oligonucleotide
gagaatatttggagatagatt

SEQ ID NO: 19053 - RNA, 21 nt, synthetic construct
  source 1..21: mol_type = other RNA; note = Description of Artificial Sequence: Synthetic oligonucleotide
agaatatttggagataggatt

SEQ ID NO: 19054 - RNA, 21 nt, synthetic construct
  source 1..21: mol_type = other RNA; note = Description of Artificial Sequence: Synthetic oligonucleotide
gaatatttggagataggcatt

SEQ ID NO: 19055 - RNA, 21 nt, synthetic construct
  source 1..21: mol_type = other RNA; note = Description of Artificial Sequence: Synthetic oligonucleotide
aatatttggagataggcaatt

SEQ ID NO: 19056 - RNA, 21 nt, synthetic construct
  source 1..21: mol_type = other RNA; note = Description of Artificial Sequence: Synthetic oligonucleotide
atatttggagataggcagatt

SEQ ID NO: 19057 - RNA, 21 nt, synthetic construct
  source 1..21: mol_type = other RNA; note = Description of Artificial Sequence: Synthetic oligonucleotide
tatttggagataggcagcatt

SEQ ID NO: 19058 - RNA, 21 nt, synthetic construct
  source 1..21: mol_type = other RNA; note = Description of Artificial Sequence: Synthetic oligonucleotide
atttggagataggcagctatt

SEQ ID NO: 19059 - RNA, 21 nt, synthetic construct
  source 1..21: mol_type = other RNA; note = Description of Artificial Sequence: Synthetic oligonucleotide
tttggagataggcagcttatt

SEQ ID NO: 19060 - RNA, 21 nt, synthetic construct
  source 1..21: mol_type = other RNA; note = Description of Artificial Sequence: Synthetic oligonucleotide
ttggagataggcagcttcatt

SEQ ID NO: 19061 - RNA, 21 nt, synthetic construct
  source 1..21: mol_type = other RNA; note = Description of Artificial Sequence: Synthetic oligonucleotide
tggagataggcagcttcaatt

SEQ ID NO: 19062 - RNA, 21 nt, synthetic construct
  source 1..21: mol_type = other RNA; note = Description of Artificial Sequence: Synthetic oligonucleotide
ggagataggcagcttcagatt

SEQ ID NO: 19063 - RNA, 21 nt, synthetic construct
  source 1..21: mol_type = other RNA; note = Description of Artificial Sequence: Synthetic oligonucleotide
gagataggcagcttcaggatt

SEQ ID NO: 19064 - RNA, 21 nt, synthetic construct
  source 1..21: mol_type = other RNA; note = Description of Artificial Sequence: Synthetic oligonucleotide
agataggcagcttcaggaatt

SEQ ID NO: 19065 - RNA, 21 nt, synthetic construct
  source 1..21: mol_type = other RNA; note = Description of Artificial Sequence: Synthetic oligonucleotide
gataggcagcttcaggatatt

SEQ ID NO: 19066 - RNA, 21 nt, synthetic construct
  source 1..21: mol_type = other RNA; note = Description of Artificial Sequence: Synthetic oligonucleotide
ataggcagcttcaggatgatt

SEQ ID NO: 19067 - RNA, 21 nt, synthetic construct
  source 1..21: mol_type = other RNA; note = Description of Artificial Sequence: Synthetic oligonucleotide
taggcagcttcaggatgcatt

SEQ ID NO: 19068 - RNA, 21 nt, synthetic construct
  source 1..21: mol_type = other RNA; note = Description of Artificial Sequence: Synthetic oligonucleotide
aggcagcttcaggatgcaatt

SEQ ID NO: 19069 - RNA, 21 nt, synthetic construct
  source 1..21: mol_type = other RNA; note = Description of Artificial Sequence: Synthetic oligonucleotide
ggcagcttcaggatgcatatt

SEQ ID NO: 19070 - RNA, 21 nt, synthetic construct
  source 1..21: mol_type = other RNA; note = Description of Artificial Sequence: Synthetic oligonucleotide
gcagcttcaggatgcattatt

SEQ ID NO: 19071 - RNA, 21 nt, synthetic construct
  source 1..21: mol_type = other RNA; note = Description of Artificial Sequence: Synthetic oligonucleotide
cagcttcaggatgcattgatt

SEQ ID NO: 19072 - RNA, 21 nt, synthetic construct
  source 1..21: mol_type = other RNA; note = Description of Artificial Sequence: Synthetic oligonucleotide
agcttcaggatgcattgcatt

SEQ ID NO: 19073 - RNA, 21 nt, synthetic construct
  source 1..21: mol_type = other RNA; note = Description of Artificial Sequence: Synthetic oligonucleotide
gcttcaggatgcattgcaatt

SEQ ID NO: 19074 - RNA, 21 nt, synthetic construct
  source 1..21: mol_type = other RNA; note = Description of Artificial Sequence: Synthetic oligonucleotide
cttcaggatgcattgcaaatt

SEQ ID NO: 19075 - RNA, 21 nt, synthetic construct
  source 1..21: mol_type = other RNA; note = Description of Artificial Sequence: Synthetic oligonucleotide
ttcaggatgcattgcaatatt

SEQ ID NO: 19076 - RNA, 21 nt, synthetic construct
  source 1..21: mol_type = other RNA; note = Description of Artificial Sequence: Synthetic oligonucleotide
tcaggatgcattgcaatcatt

SEQ ID NO: 19077 - RNA, 21 nt, synthetic construct
  source 1..21: mol_type = other RNA; note = Description of Artificial Sequence: Synthetic oligonucleotide
caggatgcattgcaatcaatt

SEQ ID NO: 19078 - RNA, 21 nt, synthetic construct
  source 1..21: mol_type = other RNA; note = Description of Artificial Sequence: Synthetic oligonucleotide
aggatgcattgcaatcatatt

SEQ ID NO: 19079 - RNA, 21 nt, synthetic construct
  source 1..21: mol_type = other RNA; note = Description of Artificial Sequence: Synthetic oligonucleotide
ggatgcattgcaatcatcatt

SEQ ID NO: 19080 - RNA, 21 nt, synthetic construct
  source 1..21: mol_type = other RNA; note = Description of Artificial Sequence: Synthetic oligonucleotide
gatgcattgcaatcatccatt

SEQ ID NO: 19081 - RNA, 21 nt, synthetic construct
  source 1..21: mol_type = other RNA; note = Description of Artificial Sequence: Synthetic oligonucleotide
atgcattgcaatcatcctatt

SEQ ID NO: 19082 - RNA, 21 nt, synthetic construct
  source 1..21: mol_type = other RNA; note = Description of Artificial Sequence: Synthetic oligonucleotide
tgcattgcaatcatccttatt

SEQ ID NO: 19083 - RNA, 21 nt, synthetic construct
  source 1..21: mol_type = other RNA; note = Description of Artificial Sequence: Synthetic oligonucleotide
gcattgcaatcatcctttatt

SEQ ID NO: 19084 - RNA, 21 nt, synthetic construct
  source 1..21: mol_type = other RNA; note = Description of Artificial Sequence: Synthetic oligonucleotide
cattgcaatcatccttttatt

SEQ ID NO: 19085 - RNA, 21 nt, synthetic construct
  source 1..21: mol_type = other RNA; note = Description of Artificial Sequence: Synthetic oligonucleotide
attgcaatcatccttttcatt

SEQ ID NO: 19086 - RNA, 21 nt, synthetic construct
  source 1..21: mol_type = other RNA; note = Description of Artificial Sequence: Synthetic oligonucleotide
ttgcaatcatccttttctatt

SEQ ID NO: 19087 - RNA, 21 nt, synthetic construct
  source 1..21: mol_type = other RNA; note = Description of Artificial Sequence: Synthetic oligonucleotide
tgcaatcatccttttcttatt

SEQ ID NO: 19088 - RNA, 21 nt, synthetic construct
  source 1..21: mol_type = other RNA; note = Description of Artificial Sequence: Synthetic oligonucleotide
gcaatcatccttttcttaatt

SEQ ID NO: 19089 - RNA, 21 nt, synthetic construct
  source 1..21: mol_type = other RNA; note = Description of Artificial Sequence: Synthetic oligonucleotide
caatcatccttttcttaaatt

SEQ ID NO: 19090 - RNA, 21 nt, synthetic construct
  source 1..21: mol_type = other RNA; note = Description of Artificial Sequence: Synthetic oligonucleotide
aatcatccttttcttaaaatt

SEQ ID NO: 19091 - RNA, 21 nt, synthetic construct
  source 1..21: mol_type = other RNA; note = Description of Artificial Sequence: Synthetic oligonucleotide
atcatccttttcttaaatatt

SEQ ID NO: 19092 - RNA, 21 nt, synthetic construct
  source 1..21: mol_type = other RNA; note = Description of Artificial Sequence: Synthetic oligonucleotide
tcatccttttcttaaattatt

SEQ ID NO: 19093 - RNA, 21 nt, synthetic construct
  source 1..21: mol_type = other RNA; note = Description of Artificial Sequence: Synthetic oligonucleotide
catccttttcttaaattaatt

SEQ ID NO: 19094 - RNA, 21 nt, synthetic construct
  source 1..21: mol_type = other RNA; note = Description of Artificial Sequence: Synthetic oligonucleotide
atccttttcttaaattatatt

SEQ ID NO: 19095 - RNA, 21 nt, synthetic construct
  source 1..21: mol_type = other RNA; note = Description of Artificial Sequence: Synthetic oligonucleotide
tccttttcttaaattatgatt

SEQ ID NO: 19096 - RNA, 21 nt, synthetic construct
  source 1..21: mol_type = other RNA; note = Description of Artificial Sequence: Synthetic oligonucleotide
ccttttcttaaattatgtatt

SEQ ID NO: 19097 - RNA, 21 nt, synthetic construct
  source 1..21: mol_type = other RNA; note = Description of Artificial Sequence: Synthetic oligonucleotide
cttttcttaaattatgtcatt

SEQ ID NO: 19098 - RNA, 21 nt, synthetic construct
  source 1..21: mol_type = other RNA; note = Description of Artificial Sequence: Synthetic oligonucleotide
ttttcttaaattatgtcaatt

SEQ ID NO: 19099 - RNA, 21 nt, synthetic construct
  source 1..21: mol_type = other RNA; note = Description of Artificial Sequence: Synthetic oligonucleotide
tttcttaaattatgtcacatt

SEQ ID NO: 19100 - RNA, 21 nt, synthetic construct
  source 1..21: mol_type = other RNA; note = Description of Artificial Sequence: Synthetic oligonucleotide
ttcttaaattatgtcactatt

SEQ ID NO: 19101 - RNA, 21 nt, synthetic construct
  source 1..21: mol_type = other RNA; note = Description of Artificial Sequence: Synthetic oligonucleotide
tcttaaattatgtcactaatt

SEQ ID NO: 19102 - RNA, 21 nt, synthetic construct
  source 1..21: mol_type = other RNA; note = Description of Artificial Sequence: Synthetic oligonucleotide
cttaaattatgtcactagatt

SEQ ID NO: 19103 - RNA, 21 nt, synthetic construct
  source 1..21: mol_type = other RNA; note = Description of Artificial Sequence: Synthetic oligonucleotide
ttaaattatgtcactagtatt

SEQ ID NO: 19104 - RNA, 21 nt, synthetic construct
  source 1..21: mol_type = other RNA; note = Description of Artificial Sequence: Synthetic oligonucleotide
taaattatgtcactagtcatt

SEQ ID NO: 19105 - RNA, 21 nt, synthetic construct
  source 1..21: mol_type = other RNA; note = Description of Artificial Sequence: Synthetic oligonucleotide
aaattatgtcactagtctatt

SEQ ID NO: 19106 - RNA, 21 nt, synthetic construct
  source 1..21: mol_type = other RNA; note = Description of Artificial Sequence: Synthetic oligonucleotide
aattatgtcactagtcttatt

SEQ ID NO: 19107 - RNA, 21 nt, synthetic construct
  source 1..21: mol_type = other RNA; note = Description of Artificial Sequence: Synthetic oligonucleotide
attatgtcactagtctttatt

SEQ ID NO: 19108 - RNA, 21 nt, synthetic construct
  source 1..21: mol_type = other RNA; note = Description of Artificial Sequence: Synthetic oligonucleotide
ttatgtcactagtcttttatt

SEQ ID NO: 19109 - RNA, 21 nt, synthetic construct
  source 1..21: mol_type = other RNA; note = Description of Artificial Sequence: Synthetic oligonucleotide
tatgtcactagtcttttaatt

SEQ ID NO: 19110 - RNA, 21 nt, synthetic construct
  source 1..21: mol_type = other RNA; note = Description of Artificial Sequence: Synthetic oligonucleotide
atgtcactagtcttttatatt

SEQ ID NO: 19111 - RNA, 21 nt, synthetic construct
  source 1..21: mol_type = other RNA; note = Description of Artificial Sequence: Synthetic oligonucleotide
tgtcactagtcttttattatt

SEQ ID NO: 19112 - RNA, 21 nt, synthetic construct
  source 1..21: mol_type = other RNA; note = Description of Artificial Sequence: Synthetic oligonucleotide
gtcactagtcttttatttatt

SEQ ID NO: 19113 - RNA, 21 nt, synthetic construct
  source 1..21: mol_type = other RNA; note = Description of Artificial Sequence: Synthetic oligonucleotide
tcactagtcttttattttatt

SEQ ID NO: 19114 - RNA, 21 nt, synthetic construct
  source 1..21: mol_type = other RNA; note = Description of Artificial Sequence: Synthetic oligonucleotide
cactagtcttttatttttatt

SEQ ID NO: 19115 - RNA, 21 nt, synthetic construct
  source 1..21: mol_type = other RNA; note = Description of Artificial Sequence: Synthetic oligonucleotide
actagtcttttattttttatt

SEQ ID NO: 19116 - RNA, 21 nt, synthetic construct
  source 1..21: mol_type = other RNA; note = Description of Artificial Sequence: Synthetic oligonucleotide
ctagtcttttattttttcatt

SEQ ID NO: 19117 - RNA, 21 nt, synthetic construct
  source 1..21: mol_type = other RNA; note = Description of Artificial Sequence: Synthetic oligonucleotide
tagtcttttattttttccatt

SEQ ID NO: 19118 - RNA, 21 nt, synthetic construct
  source 1..21: mol_type = other RNA; note = Description of Artificial Sequence: Synthetic oligonucleotide
agtcttttattttttcccatt

SEQ ID NO: 19119 - RNA, 21 nt, synthetic construct
  source 1..21: mol_type = other RNA; note = Description of Artificial Sequence: Synthetic oligonucleotide
gtcttttattttttccccatt

SEQ ID NO: 19120 - RNA, 21 nt, synthetic construct
  source 1..21: mol_type = other RNA; note = Description of Artificial Sequence: Synthetic oligonucleotide
tcttttattttttcccctatt

SEQ ID NO: 19121 - RNA, 21 nt, synthetic construct
  source 1..21: mol_type = other RNA; note = Description of Artificial Sequence: Synthetic oligonucleotide
cttttattttttcccctcatt

SEQ ID NO: 19122 - RNA, 21 nt, synthetic construct
  source 1..21: mol_type = other RNA; note = Description of Artificial Sequence: Synthetic oligonucleotide
ttttattttttcccctctatt

SEQ ID NO: 19123 - RNA, 21 nt, synthetic construct
  source 1..21: mol_type = other RNA; note = Description of Artificial Sequence: Synthetic oligonucleotide
tttattttttcccctcttatt

SEQ ID NO: 19124 - RNA, 21 nt, synthetic construct
  source 1..21: mol_type = other RNA; note = Description of Artificial Sequence: Synthetic oligonucleotide
ttattttttcccctcttgatt

SEQ ID NO: 19125 - RNA, 21 nt, synthetic construct
  source 1..21: mol_type = other RNA; note = Description of Artificial Sequence: Synthetic oligonucleotide
tattttttcccctcttgaatt

SEQ ID NO: 19126 - RNA, 21 nt, synthetic construct
  source 1..21: mol_type = other RNA; note = Description of Artificial Sequence: Synthetic oligonucleotide
attttttcccctcttgaaatt

SEQ ID NO: 19127 - RNA, 21 nt, synthetic construct
  source 1..21: mol_type = other RNA; note = Description of Artificial Sequence: Synthetic oligonucleotide
ttttttcccctcttgaacatt

SEQ ID NO: 19128 - RNA, 21 nt, synthetic construct
  source 1..21: mol_type = other RNA; note = Description of Artificial Sequence: Synthetic oligonucleotide
tttttcccctcttgaactatt

SEQ ID NO: 19129 - RNA, 21 nt, synthetic construct
  source 1..21: mol_type = other RNA; note = Description of Artificial Sequence: Synthetic oligonucleotide
ttttcccctcttgaacttatt

SEQ ID NO: 19130 - RNA, 21 nt, synthetic construct
  source 1..21: mol_type = other RNA; note = Description of Artificial Sequence: Synthetic oligonucleotide
tttcccctcttgaactttatt

SEQ ID NO: 19131 - RNA, 21 nt, synthetic construct
  source 1..21: mol_type = other RNA; note = Description of Artificial Sequence: Synthetic oligonucleotide
ttcccctcttgaactttcatt

SEQ ID NO: 19132 - RNA, 21 nt, synthetic construct
  source 1..21: mol_type = other RNA; note = Description of Artificial Sequence: Synthetic oligonucleotide
tcccctcttgaactttccatt

SEQ ID NO: 19133 - RNA, 21 nt, synthetic construct
  source 1..21: mol_type = other RNA; note = Description of Artificial Sequence: Synthetic oligonucleotide
cccctcttgaactttcctatt

SEQ ID NO: 19134 - RNA, 21 nt, synthetic construct
  source 1..21: mol_type = other RNA; note = Description of Artificial Sequence: Synthetic oligonucleotide
ccctcttgaactttcctcatt

SEQ ID NO: 19135 - RNA, 21 nt, synthetic construct
  source 1..21: mol_type = other RNA; note = Description of Artificial Sequence: Synthetic oligonucleotide
cctcttgaactttcctcaatt

SEQ ID NO: 19136 - RNA, 21 nt, synthetic construct
  source 1..21: mol_type = other RNA; note = Description of Artificial Sequence: Synthetic oligonucleotide
ctcttgaactttcctcacatt

SEQ ID NO: 19137 - RNA, 21 nt, synthetic construct
  source 1..21: mol_type = other RNA; note = Description of Artificial Sequence: Synthetic oligonucleotide
tcttgaactttcctcacaatt

SEQ ID NO: 19138 - RNA, 21 nt, synthetic construct
  source 1..21: mol_type = other RNA; note = Description of Artificial Sequence: Synthetic oligonucleotide
cttgaactttcctcacacatt

SEQ ID NO: 19139 - RNA, 21 nt, synthetic construct
  source 1..21: mol_type = other RNA; note = Description of Artificial Sequence: Synthetic oligonucleotide
ttgaactttcctcacaccatt

SEQ ID NO: 19140 - RNA, 21 nt, synthetic construct
  source 1..21: mol_type = other RNA; note = Description of Artificial Sequence: Synthetic oligonucleotide
tgaactttcctcacacctatt

SEQ ID NO: 19141 - RNA, 21 nt, synthetic construct
  source 1..21: mol_type = other RNA; note = Description of Artificial Sequence: Synthetic oligonucleotide
gaactttcctcacacctgatt

SEQ ID NO: 19142 - RNA, 21 nt, synthetic construct
  source 1..21: mol_type = other RNA; note = Description of Artificial Sequence: Synthetic oligonucleotide
aactttcctcacacctggatt

SEQ ID NO: 19143 - RNA, 21 nt, synthetic construct
  source 1..21: mol_type = other RNA; note = Description of Artificial Sequence: Synthetic oligonucleotide
actttcctcacacctggaatt

SEQ ID NO: 19144 - RNA, 21 nt, synthetic construct
  source 1..21: mol_type = other RNA; note = Description of Artificial Sequence: Synthetic oligonucleotide
ctttcctcacacctggaaatt

SEQ ID NO: 19145 - RNA, 21 nt, synthetic construct
  source 1..21: mol_type = other RNA; note = Description of Artificial Sequence: Synthetic oligonucleotide
tttcctcacacctggaagatt

SEQ ID NO: 19146 - RNA, 21 nt, synthetic construct
  source 1..21: mol_type = other RNA; note = Description of Artificial Sequence: Synthetic oligonucleotide
ttcctcacacctggaagaatt

SEQ ID NO: 19147 - RNA, 21 nt, synthetic construct
  source 1..21: mol_type = other RNA; note = Description of Artificial Sequence: Synthetic oligonucleotide
tcctcacacctggaagaaatt

SEQ ID NO: 19148 - RNA, 21 nt, synthetic construct
  source 1..21: mol_type = other RNA; note = Description of Artificial Sequence: Synthetic oligonucleotide
cctcacacctggaagaaaatt

SEQ ID NO: 19149 - RNA, 21 nt, synthetic construct
  source 1..21: mol_type = other RNA; note = Description of Artificial Sequence: Synthetic oligonucleotide
ctcacacctggaagaaacatt

SEQ ID NO: 19150 - RNA, 21 nt, synthetic construct
  source 1..21: mol_type = other RNA; note = Description of Artificial Sequence: Synthetic oligonucleotide
tcacacctggaagaaacaatt

SEQ ID NO: 19151 - RNA, 21 nt, synthetic construct
  source 1..21: mol_type = other RNA; note = Description of Artificial Sequence: Synthetic oligonucleotide
cacacctggaagaaacaaatt

SEQ ID NO: 19152 - RNA, 21 nt, synthetic construct
  source 1..21: mol_type = other RNA; note = Description of Artificial Sequence: Synthetic oligonucleotide
acacctggaagaaacaaaatt

SEQ ID NO: 19153 - RNA, 21 nt, synthetic construct
  source 1..21: mol_type = other RNA; note = Description of Artificial Sequence: Synthetic oligonucleotide
cacctggaagaaacaaagatt

SEQ ID NO: 19154 - RNA, 21 nt, synthetic construct
  source 1..21: mol_type = other RNA; note = Description of Artificial Sequence: Synthetic oligonucleotide
acctggaagaaacaaagtatt

SEQ ID NO: 19155 - RNA, 21 nt, synthetic construct
  source 1..21: mol_type = other RNA; note = Description of Artificial Sequence: Synthetic oligonucleotide
cctggaagaaacaaagtaatt

SEQ ID NO: 19156 - RNA, 21 nt, synthetic construct
  source 1..21: mol_type = other RNA; note = Description of Artificial Sequence: Synthetic oligonucleotide
ctggaagaaacaaagtagatt

SEQ ID NO: 19157 - RNA, 21 nt, synthetic construct
  source 1..21: mol_type = other RNA; note = Description of Artificial Sequence: Synthetic oligonucleotide
tggaagaaacaaagtaggatt

SEQ ID NO: 19158 - RNA, 21 nt, synthetic construct
  source 1..21: mol_type = other RNA; note = Description of Artificial Sequence: Synthetic oligonucleotide
ggaagaaacaaagtaggaatt

SEQ ID NO: 19159 - RNA, 21 nt, synthetic construct
  source 1..21: mol_type = other RNA; note = Description of Artificial Sequence: Synthetic oligonucleotide
gaagaaacaaagtaggaaatt

SEQ ID NO: 19160 - RNA, 21 nt, synthetic construct
  source 1..21: mol_type = other RNA; note = Description of Artificial Sequence: Synthetic oligonucleotide
aagaaacaaagtaggaaaatt

SEQ ID NO: 19161 - RNA, 21 nt, synthetic construct
  source 1..21: mol_type = other RNA; note = Description of Artificial Sequence: Synthetic oligonucleotide
agaaacaaagtaggaaaaatt

SEQ ID NO: 19162 - RNA, 21 nt, synthetic construct
  source 1..21: mol_type = other RNA; note = Description of Artificial Sequence: Synthetic oligonucleotide
gaaacaaagtaggaaaaaatt

SEQ ID NO: 19163 - RNA, 21 nt, synthetic construct
  source 1..21: mol_type = other RNA; note = Description of Artificial Sequence: Synthetic oligonucleotide
aaacaaagtaggaaaaagatt

SEQ ID NO: 19164 - RNA, 21 nt, synthetic construct
  source 1..21: mol_type = other RNA; note = Description of Artificial Sequence: Synthetic oligonucleotide
aacaaagtaggaaaaagtatt

SEQ ID NO: 19165 - RNA, 21 nt, synthetic construct
  source 1..21: mol_type = other RNA; note = Description of Artificial Sequence: Synthetic oligonucleotide
acaaagtaggaaaaagtgatt

SEQ ID NO: 19166 - RNA, 21 nt, synthetic construct
  source 1..21: mol_type = other RNA; note = Description of Artificial Sequence: Synthetic oligonucleotide
caaagtaggaaaaagtgaatt

SEQ ID NO: 19167 - RNA, 21 nt, synthetic construct
  source 1..21: mol_type = other RNA; note = Description of Artificial Sequence: Synthetic oligonucleotide
aaagtaggaaaaagtgaaatt

SEQ ID NO: 19168 - RNA, 21 nt, synthetic construct
  source 1..21: mol_type = other RNA; note = Description of Artificial Sequence: Synthetic oligonucleotide
aagtaggaaaaagtgaacatt

SEQ ID NO: 19169 - RNA, 21 nt, synthetic construct
  source 1..21: mol_type = other RNA; note = Description of Artificial Sequence: Synthetic oligonucleotide
agtaggaaaaagtgaacaatt

SEQ ID NO: 19170 - RNA, 21 nt, synthetic construct
  source 1..21: mol_type = other RNA; note = Description of Artificial Sequence: Synthetic oligonucleotide
gtaggaaaaagtgaacagatt

SEQ ID NO: 19171 - RNA, 21 nt, synthetic construct
  source 1..21: mol_type = other RNA; note = Description of Artificial Sequence: Synthetic oligonucleotide
taggaaaaagtgaacaggatt

SEQ ID NO: 19172 - RNA, 21 nt, synthetic construct
  source 1..21: mol_type = other RNA; note = Description of Artificial Sequence: Synthetic oligonucleotide
aggaaaaagtgaacagggatt

SEQ ID NO: 19173 - RNA, 21 nt, synthetic construct
  source 1..21: mol_type = other RNA; note = Description of Artificial Sequence: Synthetic oligonucleotide
ggaaaaagtgaacaggggatt

SEQ ID NO: 19174 - RNA, 21 nt, synthetic construct
  source 1..21: mol_type = other RNA; note = Description of Artificial Sequence: Synthetic oligonucleotide
gaaaaagtgaacaggggaatt

SEQ ID NO: 19175 - RNA, 21 nt, synthetic construct
  source 1..21: mol_type = other RNA; note = Description of Artificial Sequence: Synthetic oligonucleotide
aaaaagtgaacaggggatatt

SEQ ID NO: 19176 - RNA, 21 nt, synthetic construct
  source 1..21: mol_type = other RNA; note = Description of Artificial Sequence: Synthetic oligonucleotide
aaaagtgaacaggggatgatt

SEQ ID NO: 19177 - RNA, 21 nt, synthetic construct
  source 1..21: mol_type = other RNA; note = Description of Artificial Sequence: Synthetic oligonucleotide
aaagtgaacaggggatgtatt

SEQ ID NO: 19178 - RNA, 21 nt, synthetic construct
  source 1..21: mol_type = other RNA; note = Description of Artificial Sequence: Synthetic oligonucleotide
aagtgaacaggggatgtcatt

SEQ ID NO: 19179 - RNA, 21 nt, synthetic construct
  source 1..21: mol_type = other RNA; note = Description of Artificial Sequence: Synthetic oligonucleotide
agtgaacaggggatgtcaatt

SEQ ID NO: 19180 - RNA, 21 nt, synthetic construct
  source 1..21: mol_type = other RNA; note = Description of Artificial Sequence: Synthetic oligonucleotide
gtgaacaggggatgtcaaatt

SEQ ID NO: 19181 - RNA, 21 nt, synthetic construct
  source 1..21: mol_type = other RNA; note = Description of Artificial Sequence: Synthetic oligonucleotide
tgaacaggggatgtcaaaatt

SEQ ID NO: 19182 - RNA, 21 nt, synthetic construct
  source 1..21: mol_type = other RNA; note = Description of Artificial Sequence: Synthetic oligonucleotide
gaacaggggatgtcaaatatt

SEQ ID NO: 19183 - RNA, 21 nt, synthetic construct
  source 1..21: mol_type = other RNA; note = Description of Artificial Sequence: Synthetic oligonucleotide
aacaggggatgtcaaatcatt

SEQ ID NO: 19184 - RNA, 21 nt, synthetic construct
  source 1..21: mol_type = other RNA; note = Description of Artificial Sequence: Synthetic oligonucleotide
acaggggatgtcaaatcgatt

SEQ ID NO: 19185 - RNA, 21 nt, synthetic construct
  source 1..21: mol_type = other RNA; note = Description of Artificial Sequence: Synthetic oligonucleotide
caggggatgtcaaatcgaatt

SEQ ID NO: 19186 - RNA, 21 nt, synthetic construct
  source 1..21: mol_type = other RNA; note = Description of Artificial Sequence: Synthetic oligonucleotide
aggggatgtcaaatcgatatt

SEQ ID NO: 19187 - RNA, 21 nt, synthetic construct
  source 1..21: mol_type = other RNA; note = Description of Artificial Sequence: Synthetic oligonucleotide
ggggatgtcaaatcgattatt

SEQ ID NO: 19188 - RNA, 21 nt, synthetic construct
  source 1..21: mol_type = other RNA; note = Description of Artificial Sequence: Synthetic oligonucleotide
gggatgtcaaatcgattcatt

SEQ ID NO: 19189 - RNA, 21 nt, synthetic construct
  source 1..21: mol_type = other RNA; note = Description of Artificial Sequence: Synthetic oligonucleotide
ggatgtcaaatcgattctatt

SEQ ID NO: 19190 - RNA, 21 nt, synthetic construct
  source 1..21: mol_type = other RNA; note = Description of Artificial Sequence: Synthetic oligonucleotide
gatgtcaaatcgattcttatt

SEQ ID NO: 19191 - RNA, 21 nt, synthetic construct
  source 1..21: mol_type = other RNA; note = Description of Artificial Sequence: Synthetic oligonucleotide
atgtcaaatcgattcttgatt

SEQ ID NO: 19192 - RNA, 21 nt, synthetic construct
  source 1..21: mol_type = other RNA; note = Description of Artificial Sequence: Synthetic oligonucleotide
tgtcaaatcgattcttgaatt

SEQ ID NO: 19193 - RNA, 21 nt, synthetic construct
  source 1..21: mol_type = other RNA; note = Description of Artificial Sequence: Synthetic oligonucleotide
gtcaaatcgattcttgaaatt

SEQ ID NO: 19194 - RNA, 21 nt, synthetic construct
  source 1..21: mol_type = other RNA; note = Description of Artificial Sequence: Synthetic oligonucleotide
tcaaatcgattcttgaatatt

SEQ ID NO: 19195 - RNA, 21 nt, synthetic construct
  source 1..21: mol_type = other RNA; note = Description of Artificial Sequence: Synthetic oligonucleotide
caaatcgattcttgaattatt

SEQ ID NO: 19196 - RNA, 21 nt, synthetic construct
  source 1..21: mol_type = other RNA; note = Description of Artificial Sequence: Synthetic oligonucleotide
aaatcgattcttgaattcatt

SEQ ID NO: 19197 - RNA, 21 nt, synthetic construct
  source 1..21: mol_type = other RNA; note = Description of Artificial Sequence: Synthetic oligonucleotide
aatcgattcttgaattccatt

SEQ ID NO: 19198 - RNA, 21 nt, synthetic construct
  source 1..21: mol_type = other RNA; note = Description of Artificial Sequence: Synthetic oligonucleotide
atcgattcttgaattcccatt

SEQ ID NO: 19199 - RNA, 21 nt, synthetic construct
  source 1..21: mol_type = other RNA; note = Description of Artificial Sequence: Synthetic oligonucleotide
tcgattcttgaattcccgatt

SEQ ID NO: 19200 - RNA, 21 nt, synthetic construct
  source 1..21: mol_type = other RNA; note = Description of Artificial Sequence: Synthetic oligonucleotide
cgattcttgaattcccgcatt

SEQ ID NO: 19201 - RNA, 21 nt, synthetic construct
  source 1..21: mol_type = other RNA; note = Description of Artificial Sequence: Synthetic oligonucleotide
gattcttgaattcccgctatt

SEQ ID NO: 19202 - RNA, 21 nt, synthetic construct
  source 1..21: mol_type = other RNA; note = Description of Artificial Sequence: Synthetic oligonucleotide
attcttgaattcccgctgatt

SEQ ID NO: 19203 - RNA, 21 nt, synthetic construct
  source 1..21: mol_type = other RNA; note = Description of Artificial Sequence: Synthetic oligonucleotide
ttcttgaattcccgctgcatt

SEQ ID NO: 19204 - RNA, 21 nt, synthetic construct
  source 1..21: mol_type = other RNA; note = Description of Artificial Sequence: Synthetic oligonucleotide
tcttgaattcccgctgcaatt

SEQ ID NO: 19205 - RNA, 21 nt, synthetic construct
  source 1..21: mol_type = other RNA; note = Description of Artificial Sequence: Synthetic oligonucleotide
cttgaattcccgctgcaaatt

SEQ ID NO: 19206 - RNA, 21 nt, synthetic construct
  source 1..21: mol_type = other RNA; note = Description of Artificial Sequence: Synthetic oligonucleotide
ttgaattcccgctgcaagatt

SEQ ID NO: 19207 - RNA, 21 nt, synthetic construct
  source 1..21: mol_type = other RNA; note = Description of Artificial Sequence: Synthetic oligonucleotide
tgaattcccgctgcaagcatt

SEQ ID NO: 19208 - RNA, 21 nt, synthetic construct
  source 1..21: mol_type = other RNA; note = Description of Artificial Sequence: Synthetic oligonucleotide
gaattcccgctgcaagctatt

SEQ ID NO: 19209 - RNA, 21 nt, synthetic construct
  source 1..21: mol_type = other RNA; note = Description of Artificial Sequence: Synthetic oligonucleotide
aattcccgctgcaagctaatt

SEQ ID NO: 19210 - RNA, 21 nt, synthetic construct
  source 1..21: mol_type = other RNA; note = Description of Artificial Sequence: Synthetic oligonucleotide
attcccgctgcaagctagatt

SEQ ID NO: 19211 - RNA, 21 nt, synthetic construct
  source 1..21: mol_type = other RNA; note = Description of Artificial Sequence: Synthetic oligonucleotide
ttcccgctgcaagctagaatt

SEQ ID NO: 19212 - RNA, 21 nt, synthetic construct
  source 1..21: mol_type = other RNA; note = Description of Artificial Sequence: Synthetic oligonucleotide
tcccgctgcaagctagagatt

SEQ ID NO: 19213 - RNA, 21 nt, synthetic construct
  source 1..21: mol_type = other RNA; note = Description of Artificial Sequence: Synthetic oligonucleotide
cccgctgcaagctagagcatt

SEQ ID NO: 19214 - RNA, 21 nt, synthetic construct
  source 1..21: mol_type = other RNA; note = Description of Artificial Sequence: Synthetic oligonucleotide
ccgctgcaagctagagccatt

SEQ ID NO: 19215 - RNA, 21 nt, synthetic construct
  source 1..21: mol_type = other RNA; note = Description of Artificial Sequence: Synthetic oligonucleotide
cgctgcaagctagagccgatt

SEQ ID NO: 19216 - RNA, 21 nt, synthetic construct
  source 1..21: mol_type = other RNA; note = Description of Artificial Sequence: Synthetic oligonucleotide
gctgcaagctagagccgcatt

SEQ ID NO: 19217 - RNA, 21 nt, synthetic construct
  source 1..21: mol_type = other RNA; note = Description of Artificial Sequence: Synthetic oligonucleotide
ctgcaagctagagccgcaatt

SEQ ID NO: 19218 - RNA, 21 nt, synthetic construct
  source 1..21: mol_type = other RNA; note = Description of Artificial Sequence: Synthetic oligonucleotide
tgcaagctagagccgcagatt

SEQ ID NO: 19219 - RNA, 21 nt, synthetic construct
  source 1..21: mol_type = other RNA; note = Description of Artificial Sequence: Synthetic oligonucleotide
gcaagctagagccgcaggatt

SEQ ID NO: 19220 - RNA, 21 nt, synthetic construct
  source 1..21: mol_type = other RNA; note = Description of Artificial Sequence: Synthetic oligonucleotide
caagctagagccgcaggcatt

SEQ ID NO: 19221 - RNA, 21 nt, synthetic construct
  source 1..21: mol_type = other RNA; note = Description of Artificial Sequence: Synthetic oligonucleotide
aagctagagccgcaggcaatt

SEQ ID NO: 19222 - RNA, 21 nt, synthetic construct
  source 1..21: mol_type = other RNA; note = Description of Artificial Sequence: Synthetic oligonucleotide
agctagagccgcaggcacatt

SEQ ID NO: 19223 - RNA, 21 nt, synthetic construct
  source 1..21: mol_type = other RNA; note = Description of Artificial Sequence: Synthetic oligonucleotide
gctagagccgcaggcaccatt

SEQ ID NO: 19224 - RNA, 21 nt, synthetic construct
  source 1..21: mol_type = other RNA; note = Description of Artificial Sequence: Synthetic oligonucleotide
ctagagccgcaggcacccatt

SEQ ID NO: 19225 - RNA, 21 nt, synthetic construct
  source 1..21: mol_type = other RNA; note = Description of Artificial Sequence: Synthetic oligonucleotide
tagagccgcaggcaccctatt

SEQ ID NO: 19226 - RNA, 21 nt, synthetic construct
  source 1..21: mol_type = other RNA; note = Description of Artificial Sequence: Synthetic oligonucleotide
agagccgcaggcaccctcatt

SEQ ID NO: 19227 - RNA, 21 nt, synthetic construct
  source 1..21: mol_type = other RNA; note = Description of Artificial Sequence: Synthetic oligonucleotide
gagccgcaggcaccctctatt

SEQ ID NO: 19228 - RNA, 21 nt, synthetic construct
  source 1..21: mol_type = other RNA; note = Description of Artificial Sequence: Synthetic oligonucleotide
agccgcaggcaccctctcatt

SEQ ID NO: 19229 - RNA, 21 nt, synthetic construct
  source 1..21: mol_type = other RNA; note = Description of Artificial Sequence: Synthetic oligonucleotide
gccgcaggcaccctctcaatt

SEQ ID NO: 19230 - RNA, 21 nt, synthetic construct
  source 1..21: mol_type = other RNA; note = Description of Artificial Sequence: Synthetic oligonucleotide
ccgcaggcaccctctcacatt

SEQ ID NO: 19231 - RNA, 21 nt, synthetic construct
  source 1..21: mol_type = other RNA; note = Description of Artificial Sequence: Synthetic oligonucleotide
cgcaggcaccctctcactatt

SEQ ID NO: 19232 - RNA, 21 nt, synthetic construct
  source 1..21: mol_type = other RNA; note = Description of Artificial Sequence: Synthetic oligonucleotide
gcaggcaccctctcactcatt

SEQ ID NO: 19233 - RNA, 21 nt, synthetic construct
  source 1..21: mol_type = other RNA; note = Description of Artificial Sequence: Synthetic oligonucleotide
caggcaccctctcactcaatt

SEQ ID NO: 19234 - RNA, 21 nt, synthetic construct
  source 1..21: mol_type = other RNA; note = Description of Artificial Sequence: Synthetic oligonucleotide
aggcaccctctcactcaaatt

SEQ ID NO: 19235 - RNA, 21 nt, synthetic construct
  source 1..21: mol_type = other RNA; note = Description of Artificial Sequence: Synthetic oligonucleotide
ggcaccctctcactcaatatt

SEQ ID NO: 19236 - RNA, 21 nt, synthetic construct
  source 1..21: mol_type = other RNA; note = Description of Artificial Sequence: Synthetic oligonucleotide
gcaccctctcactcaattatt

SEQ ID NO: 19237 - RNA, 21 nt, synthetic construct
  source 1..21: mol_type = other RNA; note = Description of Artificial Sequence: Synthetic oligonucleotide
caccctctcactcaatttatt

SEQ ID NO: 19238 - RNA, 21 nt, synthetic construct
  source 1..21: mol_type = other RNA; note = Description of Artificial Sequence: Synthetic oligonucleotide
accctctcactcaatttcatt

SEQ ID NO: 19239 - RNA, 21 nt, synthetic construct
  source 1..21: mol_type = other RNA; note = Description of Artificial Sequence: Synthetic oligonucleotide
ccctctcactcaatttccatt

SEQ ID NO: 19240 - RNA, 21 nt, synthetic construct
  source 1..21: mol_type = other RNA; note = Description of Artificial Sequence: Synthetic oligonucleotide
cctctcactcaatttccaatt

SEQ ID NO: 19241 - RNA, 21 nt, synthetic construct
  source 1..21: mol_type = other RNA; note = Description of Artificial Sequence: Synthetic oligonucleotide
ctctcactcaatttccacatt

SEQ ID NO: 19242 - RNA, 21 nt, synthetic construct
  source 1..21: mol_type = other RNA; note = Description of Artificial Sequence: Synthetic oligonucleotide
tctcactcaatttccactatt

SEQ ID NO: 19243 - RNA, 21 nt, synthetic construct
  source 1..21: mol_type = other RNA; note = Description of Artificial Sequence: Synthetic oligonucleotide
ctcactcaatttccactcatt

SEQ ID NO: 19244 - RNA, 21 nt, synthetic construct
  source 1..21: mol_type = other RNA; note = Description of Artificial Sequence: Synthetic oligonucleotide
tcactcaatttccactcaatt

SEQ ID NO: 19245 - RNA, 21 nt, synthetic construct
  source 1..21: mol_type = other RNA; note = Description of Artificial Sequence: Synthetic oligonucleotide
cactcaatttccactcagatt

SEQ ID NO: 19246 - RNA, 21 nt, synthetic construct
  source 1..21: mol_type = other RNA; note = Description of Artificial Sequence: Synthetic oligonucleotide
actcaatttccactcagaatt

SEQ ID NO: 19247 - RNA, 21 nt, synthetic construct
  source 1..21: mol_type = other RNA; note = Description of Artificial Sequence: Synthetic oligonucleotide
ctcaatttccactcagaaatt

SEQ ID NO: 19248 - RNA, 21 nt, synthetic construct
  source 1..21: mol_type = other RNA; note = Description of Artificial Sequence: Synthetic oligonucleotide
tcaatttccactcagaacatt

SEQ ID NO: 19249 - RNA, 21 nt, synthetic construct
  source 1..21: mol_type = other RNA; note = Description of Artificial Sequence: Synthetic oligonucleotide
caatttccactcagaaccatt

SEQ ID NO: 19250 - RNA, 21 nt, synthetic construct
  source 1..21: mol_type = other RNA; note = Description of Artificial Sequence: Synthetic oligonucleotide
aatttccactcagaacccatt

SEQ ID NO: 19251 - RNA, 21 nt, synthetic construct
  source 1..21: mol_type = other RNA; note = Description of Artificial Sequence: Synthetic oligonucleotide
atttccactcagaaccctatt

SEQ ID NO: 19252 - RNA, 21 nt, synthetic construct
  source 1..21: mol_type = other RNA; note = Description of Artificial Sequence: Synthetic oligonucleotide
tttccactcagaaccctaatt

SEQ ID NO: 19253 - RNA, 21 nt, synthetic construct
  source 1..21: mol_type = other RNA; note = Description of Artificial Sequence: Synthetic oligonucleotide
ttccactcagaaccctatatt

SEQ ID NO: 19254 - RNA, 21 nt, synthetic construct
  source 1..21: mol_type = other RNA; note = Description of Artificial Sequence: Synthetic oligonucleotide
tccactcagaaccctataatt

SEQ ID NO: 19255 - RNA, 21 nt, synthetic construct
  source 1..21: mol_type = other RNA; note = Description of Artificial Sequence: Synthetic oligonucleotide
ccactcagaaccctataaatt

SEQ ID NO: 19256 - RNA, 21 nt, synthetic construct
  source 1..21: mol_type = other RNA; note = Description of Artificial Sequence: Synthetic oligonucleotide
cactcagaaccctataaaatt

SEQ ID NO: 19257 - RNA, 21 nt, synthetic construct
  source 1..21: mol_type = other RNA; note = Description of Artificial Sequence: Synthetic oligonucleotide
actcagaaccctataaacatt

SEQ ID NO: 19258 - RNA, 21 nt, synthetic construct
  source 1..21: mol_type = other RNA; note = Description of Artificial Sequence: Synthetic oligonucleotide
ctcagaaccctataaacaatt

SEQ ID NO: 19259 - RNA, 21 nt, synthetic construct
  source 1..21: mol_type = other RNA; note = Description of Artificial Sequence: Synthetic oligonucleotide
tcagaaccctataaacacatt

SEQ ID NO: 19260 - RNA, 21 nt, synthetic construct
  source 1..21: mol_type = other RNA; note = Description of Artificial Sequence: Synthetic oligonucleotide
cagaaccctataaacaccatt

SEQ ID NO: 19261 - RNA, 21 nt, synthetic construct
  source 1..21: mol_type = other RNA; note = Description of Artificial Sequence: Synthetic oligonucleotide
agaaccctataaacaccaatt

SEQ ID NO: 19262 - RNA, 21 nt, synthetic construct
  source 1..21: mol_type = other RNA; note = Description of Artificial Sequence: Synthetic oligonucleotide
gaaccctataaacaccagatt

SEQ ID NO: 19263 - RNA, 21 nt, synthetic construct
  source 1..21: mol_type = other RNA; note = Description of Artificial Sequence: Synthetic oligonucleotide
aaccctataaacaccagtatt

SEQ ID NO: 19264 - RNA, 21 nt, synthetic construct
  source 1..21: mol_type = other RNA; note = Description of Artificial Sequence: Synthetic oligonucleotide
accctataaacaccagtgatt

SEQ ID NO: 19265 - RNA, 21 nt, synthetic construct
  source 1..21: mol_type = other RNA; note = Description of Artificial Sequence: Synthetic oligonucleotide
ccctataaacaccagtggatt

SEQ ID NO: 19266 - RNA, 21 nt, synthetic construct
  source 1..21: mol_type = other RNA; note = Description of Artificial Sequence: Synthetic oligonucleotide
cctataaacaccagtgggatt

SEQ ID NO: 19267 - RNA, 21 nt, synthetic construct
  source 1..21: mol_type = other RNA; note = Description of Artificial Sequence: Synthetic oligonucleotide
ctataaacaccagtgggaatt

SEQ ID NO: 19268 - RNA, 21 nt, synthetic construct
  source 1..21: mol_type = other RNA; note = Description of Artificial Sequence: Synthetic oligonucleotide
tataaacaccagtgggaaatt

SEQ ID NO: 19269 - RNA, 21 nt, synthetic construct
  source 1..21: mol_type = other RNA; note = Description of Artificial Sequence: Synthetic oligonucleotide
ataaacaccagtgggaagatt

SEQ ID NO: 19270 - RNA, 21 nt, synthetic construct
  source 1..21: mol_type = other RNA; note = Description of Artificial Sequence: Synthetic oligonucleotide
taaacaccagtgggaaggatt

SEQ ID NO: 19271 - RNA, 21 nt, synthetic construct
  source 1..21: mol_type = other RNA; note = Description of Artificial Sequence: Synthetic oligonucleotide
aaacaccagtgggaagggatt

SEQ ID NO: 19272 - RNA, 21 nt, synthetic construct
  source 1..21: mol_type = other RNA; note = Description of Artificial Sequence: Synthetic oligonucleotide
aacaccagtgggaagggcatt

SEQ ID NO: 19273 - RNA, 21 nt, synthetic construct
  source 1..21: mol_type = other RNA; note = Description of Artificial Sequence: Synthetic oligonucleotide
acaccagtgggaagggcaatt

SEQ ID NO: 19274 - RNA, 21 nt, synthetic construct
  source 1..21: mol_type = other RNA; note = Description of Artificial Sequence: Synthetic oligonucleotide
caccagtgggaagggcaaatt

SEQ ID NO: 19275 - RNA, 21 nt, synthetic construct
  source 1..21: mol_type = other RNA; note = Description of Artificial Sequence: Synthetic oligonucleotide
accagtgggaagggcaacatt

SEQ ID NO: 19276 - RNA, 21 nt, synthetic construct
  source 1..21: mol_type = other RNA; note = Description of Artificial Sequence: Synthetic oligonucleotide
ccagtgggaagggcaaccatt

SEQ ID NO: 19277 - RNA, 21 nt, synthetic construct
  source 1..21: mol_type = other RNA; note = Description of Artificial Sequence: Synthetic oligonucleotide
cagtgggaagggcaacccatt

SEQ ID NO: 19278 - RNA, 21 nt, synthetic construct
  source 1..21: mol_type = other RNA; note = Description of Artificial Sequence: Synthetic oligonucleotide
agtgggaagggcaacccaatt

SEQ ID NO: 19279 - RNA, 21 nt, synthetic construct
  source 1..21: mol_type = other RNA; note = Description of Artificial Sequence: Synthetic oligonucleotide
gtgggaagggcaacccacatt

SEQ ID NO: 19280 - RNA, 21 nt, synthetic construct
  source 1..21: mol_type = other RNA; note = Description of Artificial Sequence: Synthetic oligonucleotide
tgggaagggcaacccactatt

SEQ ID NO: 19281 - RNA, 21 nt, synthetic construct
  source 1..21: mol_type = other RNA; note = Description of Artificial Sequence: Synthetic oligonucleotide
gggaagggcaacccactgatt

SEQ ID NO: 19282 - RNA, 21 nt, synthetic construct
  source 1..21: mol_type = other RNA; note = Description of Artificial Sequence: Synthetic oligonucleotide
ggaagggcaacccactgcatt

SEQ ID NO: 19283 - RNA, 21 nt, synthetic construct
  source 1..21: mol_type = other RNA; note = Description of Artificial Sequence: Synthetic oligonucleotide
gaagggcaacccactgcaatt

SEQ ID NO: 19284 - RNA, 21 nt, synthetic construct
  source 1..21: mol_type = other RNA; note = Description of Artificial Sequence: Synthetic oligonucleotide
aagggcaacccactgcacatt

SEQ ID NO: 19285 - RNA, 21 nt, synthetic construct
  source 1..21: mol_type = other RNA; note = Description of Artificial Sequence: Synthetic oligonucleotide
agggcaacccactgcacgatt

SEQ ID NO: 19286 - RNA, 21 nt, synthetic construct
  source 1..21: mol_type = other RNA; note = Description of Artificial Sequence: Synthetic oligonucleotide
gggcaacccactgcacgtatt

SEQ ID NO: 19287 - RNA, 21 nt, synthetic construct
  source 1..21: mol_type = other RNA; note = Description of Artificial Sequence: Synthetic oligonucleotide
ggcaacccactgcacgtgatt

SEQ ID NO: 19288 - RNA, 21 nt, synthetic construct
  source 1..21: mol_type = other RNA; note = Description of Artificial Sequence: Synthetic oligonucleotide
gcaacccactgcacgtggatt

SEQ ID NO: 19289 - RNA, 21 nt, synthetic construct
  source 1..21: mol_type = other RNA; note = Description of Artificial Sequence: Synthetic oligonucleotide
caacccactgcacgtgggatt

SEQ ID NO: 19290 - RNA, 21 nt, synthetic construct
  source 1..21: mol_type = other RNA; note = Description of Artificial Sequence: Synthetic oligonucleotide
aacccactgcacgtgggaatt

SEQ ID NO: 19291 - RNA, 21 nt, synthetic construct
  source 1..21: mol_type = other RNA; note = Description of Artificial Sequence: Synthetic oligonucleotide
acccactgcacgtgggaaatt

SEQ ID NO: 19292 - RNA, 21 nt, synthetic construct
  source 1..21: mol_type = other RNA; note = Description of Artificial Sequence: Synthetic oligonucleotide
cccactgcacgtgggaatatt

SEQ ID NO: 19293 - RNA, 21 nt, synthetic construct
  source 1..21: mol_type = other RNA; note = Description of Artificial Sequence: Synthetic oligonucleotide
ccactgcacgtgggaatgatt

SEQ ID NO: 19294 - RNA, 21 nt, synthetic construct
  source 1..21: mol_type = other RNA; note = Description of Artificial Sequence: Synthetic oligonucleotide
cactgcacgtgggaatgcatt

SEQ ID NO: 19295 - RNA, 21 nt, synthetic construct
  source 1..21: mol_type = other RNA; note = Description of Artificial Sequence: Synthetic oligonucleotide
actgcacgtgggaatgcaatt

SEQ ID NO: 19296 - RNA, 21 nt, synthetic construct
  source 1..21: mol_type = other RNA; note = Description of Artificial Sequence: Synthetic oligonucleotide
ctgcacgtgggaatgcacatt

SEQ ID NO: 19297 - RNA, 21 nt, synthetic construct
  source 1..21: mol_type = other RNA; note = Description of Artificial Sequence: Synthetic oligonucleotide
tgcacgtgggaatgcactatt

SEQ ID NO: 19298 - RNA, 21 nt, synthetic construct
  source 1..21: mol_type = other RNA; note = Description of Artificial Sequence: Synthetic oligonucleotide
gcacgtgggaatgcactgatt

SEQ ID NO: 19299 - RNA, 21 nt, synthetic construct
  source 1..21: mol_type = other RNA; note = Description of Artificial Sequence: Synthetic oligonucleotide
cacgtgggaatgcactgaatt

SEQ ID NO: 19300 - RNA, 21 nt, synthetic construct
  source 1..21: mol_type = other RNA; note = Description of Artificial Sequence: Synthetic oligonucleotide
acgtgggaatgcactgatatt

SEQ ID NO: 19301 - RNA, 21 nt, synthetic construct
  source 1..21: mol_type = other RNA; note = Description of Artificial Sequence: Synthetic oligonucleotide
cgtgggaatgcactgattatt

SEQ ID NO: 19302 - RNA, 21 nt, synthetic construct
  source 1..21: mol_type = other RNA; note = Description of Artificial Sequence: Synthetic oligonucleotide
gtgggaatgcactgatttatt

SEQ ID NO: 19303 - RNA, 21 nt, synthetic construct
  source 1..21: mol_type = other RNA; note = Description of Artificial Sequence: Synthetic oligonucleotide
tgggaatgcactgattttatt

SEQ ID NO: 19304 - RNA, 21 nt, synthetic construct
  source 1..21: mol_type = other RNA; note = Description of Artificial Sequence: Synthetic oligonucleotide
gggaatgcactgatttttatt

SEQ ID NO: 19305 - RNA, 21 nt, synthetic construct
  source 1..21: mol_type = other RNA; note = Description of Artificial Sequence: Synthetic oligonucleotide
ggaatgcactgatttttcatt

SEQ ID NO: 19306 - RNA, 21 nt, synthetic construct
  source 1..21: mol_type = other RNA; note = Description of Artificial Sequence: Synthetic oligonucleotide
gaatgcactgatttttccatt

SEQ ID NO: 19307 - RNA, 21 nt, synthetic construct
  source 1..21: mol_type = other RNA; note = Description of Artificial Sequence: Synthetic oligonucleotide
aatgcactgatttttcctatt

SEQ ID NO: 19308 - RNA, 21 nt, synthetic construct
  source 1..21: mol_type = other RNA; note = Description of Artificial Sequence: Synthetic oligonucleotide
atgcactgatttttcctaatt

SEQ ID NO: 19309 - RNA, 21 nt, synthetic construct
  source 1..21: mol_type = other RNA; note = Description of Artificial Sequence: Synthetic oligonucleotide
tgcactgatttttcctagatt

SEQ ID NO: 19310 - RNA, 21 nt, synthetic construct
  source 1..21: mol_type = other RNA; note = Description of Artificial Sequence: Synthetic oligonucleotide
gcactgatttttcctaggatt

SEQ ID NO: 19311 - RNA, 21 nt, synthetic construct
  source 1..21: mol_type = other RNA; note = Description of Artificial Sequence: Synthetic oligonucleotide
cactgatttttcctaggaatt

SEQ ID NO: 19312 - RNA, 21 nt, synthetic construct
  source 1..21: mol_type = other RNA; note = Description of Artificial Sequence: Synthetic oligonucleotide
actgatttttcctaggagatt

SEQ ID NO: 19313 - RNA, 21 nt, synthetic construct
  source 1..21: mol_type = other RNA; note = Description of Artificial Sequence: Synthetic oligonucleotide
ctgatttttcctaggagtatt

SEQ ID NO: 19314 - RNA, 21 nt, synthetic construct
  source 1..21: mol_type = other RNA; note = Description of Artificial Sequence: Synthetic oligonucleotide
tgatttttcctaggagtaatt

SEQ ID NO: 19315 - RNA, 21 nt, synthetic construct
  source 1..21: mol_type = other RNA; note = Description of Artificial Sequence: Synthetic oligonucleotide
gatttttcctaggagtagatt

SEQ ID NO: 19316 - RNA, 21 nt, synthetic construct
  source 1..21: mol_type = other RNA; note = Description of Artificial Sequence: Synthetic oligonucleotide
atttttcctaggagtagaatt

SEQ ID NO: 19317 - RNA, 21 nt, synthetic construct
  source 1..21: mol_type = other RNA; note = Description of Artificial Sequence: Synthetic oligonucleotide
tttttcctaggagtagacatt

SEQ ID NO: 19318 - RNA, 21 nt, synthetic construct
  source 1..21: mol_type = other RNA; note = Description of Artificial Sequence: Synthetic oligonucleotide
ttttcctaggagtagacaatt

SEQ ID NO: 19319 - RNA, 21 nt, synthetic construct
  source 1..21: mol_type = other RNA; note = Description of Artificial Sequence: Synthetic oligonucleotide
tttcctaggagtagacatatt

SEQ ID NO: 19320 - RNA, 21 nt, synthetic construct
  source 1..21: mol_type = other RNA; note = Description of Artificial Sequence: Synthetic oligonucleotide
ttcctaggagtagacatgatt

SEQ ID NO: 19321 - RNA, 21 nt, synthetic construct
  source 1..21: mol_type = other RNA; note = Description of Artificial Sequence: Synthetic oligonucleotide
tcctaggagtagacatgtatt

SEQ ID NO: 19322 - RNA, 21 nt, synthetic construct
  source 1..21: mol_type = other RNA; note = Description of Artificial Sequence: Synthetic oligonucleotide
cctaggagtagacatgttatt

SEQ ID NO: 19323 - RNA, 21 nt, synthetic construct
  source 1..21: mol_type = other RNA; note = Description of Artificial Sequence: Synthetic oligonucleotide
ctaggagtagacatgttcatt

SEQ ID NO: 19324 - RNA, 21 nt, synthetic construct
  source 1..21: mol_type = other RNA; note = Description of Artificial Sequence: Synthetic oligonucleotide
taggagtagacatgttccatt

SEQ ID NO: 19325 - RNA, 21 nt, synthetic construct
  source 1..21: mol_type = other RNA; note = Description of Artificial Sequence: Synthetic oligonucleotide
aggagtagacatgttcctatt

SEQ ID NO: 19326 - RNA, 21 nt, synthetic construct
  source 1..21: mol_type = other RNA; note = Description of Artificial Sequence: Synthetic oligonucleotide
ggagtagacatgttcctcatt

SEQ ID NO: 19327 - RNA, 21 nt, synthetic construct
  source 1..21: mol_type = other RNA; note = Description of Artificial Sequence: Synthetic oligonucleotide
gagtagacatgttcctctatt

SEQ ID NO: 19328 - RNA, 21 nt, synthetic construct
  source 1..21: mol_type = other RNA; note = Description of Artificial Sequence: Synthetic oligonucleotide
agtagacatgttcctctaatt

SEQ ID NO: 19329 - RNA, 21 nt, synthetic construct
  source 1..21: mol_type = other RNA; note = Description of Artificial Sequence: Synthetic oligonucleotide
gtagacatgttcctctaaatt

SEQ ID NO: 19330 - RNA, 21 nt, synthetic construct
  source 1..21: mol_type = other RNA; note = Description of Artificial Sequence: Synthetic oligonucleotide
tagacatgttcctctaatatt

SEQ ID NO: 19331 - RNA, 21 nt, synthetic construct
  source 1..21: mol_type = other RNA; note = Description of Artificial Sequence: Synthetic oligonucleotide
agacatgttcctctaattatt

SEQ ID NO: 19332 - RNA, 21 nt, synthetic construct
  source 1..21: mol_type = other RNA; note = Description of Artificial Sequence: Synthetic oligonucleotide
gacatgttcctctaattaatt

SEQ ID NO: 19333 - RNA, 21 nt, synthetic construct
  source 1..21: mol_type = other RNA; note = Description of Artificial Sequence: Synthetic oligonucleotide
acatgttcctctaattacatt

SEQ ID NO: 19334 - RNA, 21 nt, synthetic construct
  source 1..21: mol_type = other RNA; note = Description of Artificial Sequence: Synthetic oligonucleotide
catgttcctctaattactatt

SEQ ID NO: 19335 - RNA, 21 nt, synthetic construct
  source 1..21: mol_type = other RNA; note = Description of Artificial Sequence: Synthetic oligonucleotide
atgttcctctaattactcatt

SEQ ID NO: 19336 - RNA, 21 nt, synthetic construct
  source 1..21: mol_type = other RNA; note = Description of Artificial Sequence: Synthetic oligonucleotide
tgttcctctaattactccatt

SEQ ID NO: 19337 - RNA, 21 nt, synthetic construct
  source 1..21: mol_type = other RNA; note = Description of Artificial Sequence: Synthetic oligonucleotide
gttcctctaattactcccatt

SEQ ID NO: 19338 - RNA, 21 nt, synthetic construct
  source 1..21: mol_type = other RNA; note = Description of Artificial Sequence: Synthetic oligonucleotide
ttcctctaattactccctatt

SEQ ID NO: 19339 - RNA, 21 nt, synthetic construct
  source 1..21: mol_type = other RNA; note = Description of Artificial Sequence: Synthetic oligonucleotide
tcctctaattactccctgatt

SEQ ID NO: 19340 - RNA, 21 nt, synthetic construct
  source 1..21: mol_type = other RNA; note = Description of Artificial Sequence: Synthetic oligonucleotide
cctctaattactccctgaatt

SEQ ID NO: 19341 - RNA, 21 nt, synthetic construct
  source 1..21: mol_type = other RNA; note = Description of Artificial Sequence: Synthetic oligonucleotide
ctctaattactccctgagatt

SEQ ID NO: 19342 - RNA, 21 nt, synthetic construct
  source 1..21: mol_type = other RNA; note = Description of Artificial Sequence: Synthetic oligonucleotide
tctaattactccctgaggatt

SEQ ID NO: 19343 - RNA, 21 nt, synthetic construct
  source 1..21: mol_type = other RNA; note = Description of Artificial Sequence: Synthetic oligonucleotide
ctaattactccctgagggatt

SEQ ID NO: 19344 - RNA, 21 nt, synthetic construct
  source 1..21: mol_type = other RNA; note = Description of Artificial Sequence: Synthetic oligonucleotide
taattactccctgagggtatt

SEQ ID NO: 19345 - RNA, 21 nt, synthetic construct
  source 1..21: mol_type = other RNA; note = Description of Artificial Sequence: Synthetic oligonucleotide
aattactccctgagggttatt

SEQ ID NO: 19346 - RNA, 21 nt, synthetic construct
  source 1..21: mol_type = other RNA; note = Description of Artificial Sequence: Synthetic oligonucleotide
attactccctgagggttaatt

SEQ ID NO: 19347 - RNA, 21 nt, synthetic construct
  source 1..21: mol_type = other RNA; note = Description of Artificial Sequence: Synthetic oligonucleotide
ttactccctgagggttagatt

SEQ ID NO: 19348 - RNA, 21 nt, synthetic construct
  source 1..21: mol_type = other RNA; note = Description of Artificial Sequence: Synthetic oligonucleotide
tactccctgagggttagtatt

SEQ ID NO: 19349 - RNA, 21 nt, synthetic construct
  source 1..21: mol_type = other RNA; note = Description of Artificial Sequence: Synthetic oligonucleotide
actccctgagggttagttatt

SEQ ID NO: 19350 - RNA, 21 nt, synthetic construct
  source 1..21: mol_type = other RNA; note = Description of Artificial Sequence: Synthetic oligonucleotide
ctccctgagggttagttgatt

SEQ ID NO: 19351 - RNA, 21 nt, synthetic construct
  source 1..21: mol_type = other RNA; note = Description of Artificial Sequence: Synthetic oligonucleotide
tccctgagggttagttggatt

SEQ ID NO: 19352 - RNA, 21 nt, synthetic construct
  source 1..21: mol_type = other RNA; note = Description of Artificial Sequence: Synthetic oligonucleotide
ccctgagggttagttgggatt

SEQ ID NO: 19353 - RNA, 21 nt, synthetic construct
  source 1..21: mol_type = other RNA; note = Description of Artificial Sequence: Synthetic oligonucleotide
cctgagggttagttggggatt

SEQ ID NO: 19354 - RNA, 21 nt, synthetic construct
  source 1..21: mol_type = other RNA; note = Description of Artificial Sequence: Synthetic oligonucleotide
ctgagggttagttggggcatt

SEQ ID NO: 19355 - RNA, 21 nt, synthetic construct
  source 1..21: mol_type = other RNA; note = Description of Artificial Sequence: Synthetic oligonucleotide
tgagggttagttggggctatt

SEQ ID NO: 19356 - RNA, 21 nt, synthetic construct
  source 1..21: mol_type = other RNA; note = Description of Artificial Sequence: Synthetic oligonucleotide
gagggttagttggggctaatt

SEQ ID NO: 19357 - RNA, 21 nt, synthetic construct
  source 1..21: mol_type = other RNA; note = Description of Artificial Sequence: Synthetic oligonucleotide
agggttagttggggctaaatt

SEQ ID NO: 19358 - RNA, 21 nt, synthetic construct
  source 1..21: mol_type = other RNA; note = Description of Artificial Sequence: Synthetic oligonucleotide
gggttagttggggctaaaatt

SEQ ID NO: 19359 - RNA, 21 nt, synthetic construct
  source 1..21: mol_type = other RNA; note = Description of Artificial Sequence: Synthetic oligonucleotide
ggttagttggggctaaacatt

SEQ ID NO: 19360 - RNA, 21 nt, synthetic construct
  source 1..21: mol_type = other RNA; note = Description of Artificial Sequence: Synthetic oligonucleotide
gttagttggggctaaaccatt

SEQ ID NO: 19361 - RNA, 21 nt, synthetic construct
  source 1..21: mol_type = other RNA; note = Description of Artificial Sequence: Synthetic oligonucleotide
ttagttggggctaaaccaatt

SEQ ID NO: 19362 - RNA, 21 nt, synthetic construct
  source 1..21: mol_type = other RNA; note = Description of Artificial Sequence: Synthetic oligonucleotide
tagttggggctaaaccatatt

SEQ ID NO: 19363 - RNA, 21 nt, synthetic construct
  source 1..21: mol_type = other RNA; note = Description of Artificial Sequence: Synthetic oligonucleotide
agttggggctaaaccatgatt

SEQ ID NO: 19364 - RNA, 21 nt, synthetic construct
  source 1..21: mol_type = other RNA; note = Description of Artificial Sequence: Synthetic oligonucleotide
gttggggctaaaccatgaatt

SEQ ID NO: 19365 - RNA, 21 nt, synthetic construct
  source 1..21: mol_type = other RNA; note = Description of Artificial Sequence: Synthetic oligonucleotide
ttggggctaaaccatgacatt

SEQ ID NO: 19366 - RNA, 21 nt, synthetic construct
  source 1..21: mol_type = other RNA; note = Description of Artificial Sequence: Synthetic oligonucleotide
tggggctaaaccatgacaatt

SEQ ID NO: 19367 - RNA, 21 nt, synthetic construct
  source 1..21: mol_type = other RNA; note = Description of Artificial Sequence: Synthetic oligonucleotide
ggggctaaaccatgacagatt

SEQ ID NO: 19368 - RNA, 21 nt, synthetic construct
  source 1..21: mol_type = other RNA; note = Description of Artificial Sequence: Synthetic oligonucleotide
gggctaaaccatgacagaatt

SEQ ID NO: 19369 - RNA, 21 nt, synthetic construct
  source 1..21: mol_type = other RNA; note = Description of Artificial Sequence: Synthetic oligonucleotide
ggctaaaccatgacagaaatt

SEQ ID NO: 19370 - RNA, 21 nt, synthetic construct
  source 1..21: mol_type = other RNA; note = Description of Artificial Sequence: Synthetic oligonucleotide
gctaaaccatgacagaagatt

SEQ ID NO: 19371 - RNA, 21 nt, synthetic construct
  source 1..21: mol_type = other RNA; note = Description of Artificial Sequence: Synthetic oligonucleotide
ctaaaccatgacagaagtatt

SEQ ID NO: 19372 - RNA, 21 nt, synthetic construct
  source 1..21: mol_type = other RNA; note = Description of Artificial Sequence: Synthetic oligonucleotide
taaaccatgacagaagtgatt

SEQ ID NO: 19373 - RNA, 21 nt, synthetic construct
  source 1..21: mol_type = other RNA; note = Description of Artificial Sequence: Synthetic oligonucleotide
aaaccatgacagaagtggatt

SEQ ID NO: 19374 - RNA, 21 nt, synthetic construct
  source 1..21: mol_type = other RNA; note = Description of Artificial Sequence: Synthetic oligonucleotide
aaccatgacagaagtgggatt

SEQ ID NO: 19375 - RNA, 21 nt, synthetic construct
  source 1..21: mol_type = other RNA; note = Description of Artificial Sequence: Synthetic oligonucleotide
accatgacagaagtggggatt

SEQ ID NO: 19376 - RNA, 21 nt, synthetic construct
  source 1..21: mol_type = other RNA; note = Description of Artificial Sequence: Synthetic oligonucleotide
ccatgacagaagtggggaatt

SEQ ID NO: 19377 - RNA, 21 nt, synthetic construct
  source 1..21: mol_type = other RNA; note = Description of Artificial Sequence: Synthetic oligonucleotide
catgacagaagtggggaaatt

SEQ ID NO: 19378 - RNA, 21 nt, synthetic construct
  source 1..21: mol_type = other RNA; note = Description of Artificial Sequence: Synthetic oligonucleotide
atgacagaagtggggaagatt

SEQ ID NO: 19379 - RNA, 21 nt, synthetic construct
  source 1..21: mol_type = other RNA; note = Description of Artificial Sequence: Synthetic oligonucleotide
tgacagaagtggggaagtatt

SEQ ID NO: 19380 - RNA, 21 nt, synthetic construct
  source 1..21: mol_type = other RNA; note = Description of Artificial Sequence: Synthetic oligonucleotide
gacagaagtggggaagttatt

SEQ ID NO: 19381 - RNA, 21 nt, synthetic construct
  source 1..21: mol_type = other RNA; note = Description of Artificial Sequence: Synthetic oligonucleotide
acagaagtggggaagttcatt

SEQ ID NO: 19382 - RNA, 21 nt, synthetic construct
  source 1..21: mol_type = other RNA; note = Description of Artificial Sequence: Synthetic oligonucleotide
cagaagtggggaagttcaatt

SEQ ID NO: 19383 - RNA, 21 nt, synthetic construct
  source 1..21: mol_type = other RNA; note = Description of Artificial Sequence: Synthetic oligonucleotide
agaagtggggaagttcaaatt

SEQ ID NO: 19384 - RNA, 21 nt, synthetic construct
  source 1..21: mol_type = other RNA; note = Description of Artificial Sequence: Synthetic oligonucleotide
gaagtggggaagttcaatatt

SEQ ID NO: 19385 - RNA, 21 nt, synthetic construct
  source 1..21: mol_type = other RNA; note = Description of Artificial Sequence: Synthetic oligonucleotide
aagtggggaagttcaatgatt

SEQ ID NO: 19386 - RNA, 21 nt, synthetic construct
  source 1..21: mol_type = other RNA; note = Description of Artificial Sequence: Synthetic oligonucleotide
agtggggaagttcaatgtatt

SEQ ID NO: 19387 - RNA, 21 nt, synthetic construct
  source 1..21: mol_type = other RNA; note = Description of Artificial Sequence: Synthetic oligonucleotide
gtggggaagttcaatgtcatt

SEQ ID NO: 19388 - RNA, 21 nt, synthetic construct
  source 1..21: mol_type = other RNA; note = Description of Artificial Sequence: Synthetic oligonucleotide
tggggaagttcaatgtccatt

SEQ ID NO: 19389 - RNA, 21 nt, synthetic construct
  source 1..21: mol_type = other RNA; note = Description of Artificial Sequence: Synthetic oligonucleotide
ggggaagttcaatgtcctatt

SEQ ID NO: 19390 - RNA, 21 nt, synthetic construct
  source 1..21: mol_type = other RNA; note = Description of Artificial Sequence: Synthetic oligonucleotide
gggaagttcaatgtccttatt

SEQ ID NO: 19391 - RNA, 21 nt, synthetic construct
  source 1..21: mol_type = other RNA; note = Description of Artificial Sequence: Synthetic oligonucleotide
ggaagttcaatgtccttaatt

SEQ ID NO: 19392 - RNA, 21 nt, synthetic construct
  source 1..21: mol_type = other RNA; note = Description of Artificial Sequence: Synthetic oligonucleotide
gaagttcaatgtccttaaatt

SEQ ID NO: 19393 - RNA, 21 nt, synthetic construct
  source 1..21: mol_type = other RNA; note = Description of Artificial Sequence: Synthetic oligonucleotide
aagttcaatgtccttaaaatt

SEQ ID NO: 19394 - RNA, 21 nt, synthetic construct
  source 1..21: mol_type = other RNA; note = Description of Artificial Sequence: Synthetic oligonucleotide
agttcaatgtccttaaatatt

SEQ ID NO: 19395 - RNA, 21 nt, synthetic construct
  source 1..21: mol_type = other RNA; note = Description of Artificial Sequence: Synthetic oligonucleotide
gttcaatgtccttaaatcatt

SEQ ID NO: 19396 - RNA, 21 nt, synthetic construct
  source 1..21: mol_type = other RNA; note = Description of Artificial Sequence: Synthetic oligonucleotide
ttcaatgtccttaaatccatt

SEQ ID NO: 19397 - RNA, 21 nt, synthetic construct
  source 1..21: mol_type = other RNA; note = Description of Artificial Sequence: Synthetic oligonucleotide
tcaatgtccttaaatccaatt

SEQ ID NO: 19398 - RNA, 21 nt, synthetic construct
  source 1..21: mol_type = other RNA; note = Description of Artificial Sequence: Synthetic oligonucleotide
caatgtccttaaatccatatt

SEQ ID NO: 19399 - RNA, 21 nt, synthetic construct
  source 1..21: mol_type = other RNA; note = Description of Artificial Sequence: Synthetic oligonucleotide
aatgtccttaaatccatcatt

SEQ ID NO: 19400 - RNA, 21 nt, synthetic construct
  source 1..21: mol_type = other RNA; note = Description of Artificial Sequence: Synthetic oligonucleotide
atgtccttaaatccatctatt

SEQ ID NO: 19401 - RNA, 21 nt, synthetic construct
  source 1..21: mol_type = other RNA; note = Description of Artificial Sequence: Synthetic oligonucleotide
tgtccttaaatccatcttatt

SEQ ID NO: 19402 - RNA, 21 nt, synthetic construct
  source 1..21: mol_type = other RNA; note = Description of Artificial Sequence: Synthetic oligonucleotide
gtccttaaatccatcttaatt

SEQ ID NO: 19403 - RNA, 21 nt, synthetic construct
  source 1..21: mol_type = other RNA; note = Description of Artificial Sequence: Synthetic oligonucleotide
tccttaaatccatcttacatt

SEQ ID NO: 19404 - RNA, 21 nt, synthetic construct
  source 1..21: mol_type = other RNA; note = Description of Artificial Sequence: Synthetic oligonucleotide
ccttaaatccatcttactatt

SEQ ID NO: 19405 - RNA, 21 nt, synthetic construct
  source 1..21: mol_type = other RNA; note = Description of Artificial Sequence: Synthetic oligonucleotide
cttaaatccatcttacttatt

SEQ ID NO: 19406 - RNA, 21 nt, synthetic construct
  source 1..21: mol_type = other RNA; note = Description of Artificial Sequence: Synthetic oligonucleotide
ttaaatccatcttacttgatt

SEQ ID NO: 19407 - RNA, 21 nt, synthetic construct
  source 1..21: mol_type = other RNA; note = Description of Artificial Sequence: Synthetic oligonucleotide
taaatccatcttacttgcatt

SEQ ID NO: 19408 - RNA, 21 nt, synthetic construct
  source 1..21: mol_type = other RNA; note = Description of Artificial Sequence: Synthetic oligonucleotide
aaatccatcttacttgccatt

SEQ ID NO: 19409 - RNA, 21 nt, synthetic construct
  source 1..21: mol_type = other RNA; note = Description of Artificial Sequence: Synthetic oligonucleotide
aatccatcttacttgccaatt

SEQ ID NO: 19410 - RNA, 21 nt, synthetic construct
  source 1..21: mol_type = other RNA; note = Description of Artificial Sequence: Synthetic oligonucleotide
atccatcttacttgccaaatt

SEQ ID NO: 19411 - RNA, 21 nt, synthetic construct
  source 1..21: mol_type = other RNA; note = Description of Artificial Sequence: Synthetic oligonucleotide
tccatcttacttgccaacatt

SEQ ID NO: 19412 - RNA, 21 nt, synthetic construct
  source 1..21: mol_type = other RNA; note = Description of Artificial Sequence: Synthetic oligonucleotide
ccatcttacttgccaacaatt

SEQ ID NO: 19413 - RNA, 21 nt, synthetic construct
  source 1..21: mol_type = other RNA; note = Description of Artificial Sequence: Synthetic oligonucleotide
catcttacttgccaacagatt

SEQ ID NO: 19414 - RNA, 21 nt, synthetic construct
  source 1..21: mol_type = other RNA; note = Description of Artificial Sequence: Synthetic oligonucleotide
atcttacttgccaacaggatt

SEQ ID NO: 19415 - RNA, 21 nt, synthetic construct
  source 1..21: mol_type = other RNA; note = Description of Artificial Sequence: Synthetic oligonucleotide
tcttacttgccaacaggtatt

SEQ ID NO: 19416 - RNA, 21 nt, synthetic construct
  source 1..21: mol_type = other RNA; note = Description of Artificial Sequence: Synthetic oligonucleotide
cttacttgccaacaggtaatt

SEQ ID NO: 19417 - RNA, 21 nt, synthetic construct
  source 1..21: mol_type = other RNA; note = Description of Artificial Sequence: Synthetic oligonucleotide
ttacttgccaacaggtaaatt

SEQ ID NO: 19418 - RNA, 21 nt, synthetic construct
  source 1..21: mol_type = other RNA; note = Description of Artificial Sequence: Synthetic oligonucleotide
tacttgccaacaggtaagatt

SEQ ID NO: 19419 - RNA, 21 nt, synthetic construct
  source 1..21: mol_type = other RNA; note = Description of Artificial Sequence: Synthetic oligonucleotide
acttgccaacaggtaagaatt

SEQ ID NO: 19420 - RNA, 21 nt, synthetic construct
  source 1..21: mol_type = other RNA; note = Description of Artificial Sequence: Synthetic oligonucleotide
cttgccaacaggtaagagatt

SEQ ID NO: 19421 - RNA, 21 nt, synthetic construct
  source 1..21: mol_type = other RNA; note = Description of Artificial Sequence: Synthetic oligonucleotide
ttgccaacaggtaagaggatt

SEQ ID NO: 19422 - RNA, 21 nt, synthetic construct
  source 1..21: mol_type = other RNA; note = Description of Artificial Sequence: Synthetic oligonucleotide
tgccaacaggtaagaggaatt

SEQ ID NO: 19423 - RNA, 21 nt, synthetic construct
  source 1..21: mol_type = other RNA; note = Description of Artificial Sequence: Synthetic oligonucleotide
gccaacaggtaagaggaaatt

SEQ ID NO: 19424 - RNA, 21 nt, synthetic construct
  source 1..21: mol_type = other RNA; note = Description of Artificial Sequence: Synthetic oligonucleotide
ccaacaggtaagaggaagatt

SEQ ID NO: 19425 - RNA, 21 nt, synthetic construct
  source 1..21: mol_type = other RNA; note = Description of Artificial Sequence: Synthetic oligonucleotide
caacaggtaagaggaagcatt

SEQ ID NO: 19426 - RNA, 21 nt, synthetic construct
  source 1..21: mol_type = other RNA; note = Description of Artificial Sequence: Synthetic oligonucleotide
aacaggtaagaggaagctatt

SEQ ID NO: 19427 - RNA, 21 nt, synthetic construct
  source 1..21: mol_type = other RNA; note = Description of Artificial Sequence: Synthetic oligonucleotide
acaggtaagaggaagcttatt

SEQ ID NO: 19428 - RNA, 21 nt, synthetic construct
  source 1..21: mol_type = other RNA; note = Description of Artificial Sequence: Synthetic oligonucleotide
caggtaagaggaagcttaatt

SEQ ID NO: 19429 - RNA, 21 nt, synthetic construct
  source 1..21: mol_type = other RNA; note = Description of Artificial Sequence: Synthetic oligonucleotide
aggtaagaggaagcttacatt

SEQ ID NO: 19430 - RNA, 21 nt, synthetic construct
  source 1..21: mol_type = other RNA; note = Description of Artificial Sequence: Synthetic oligonucleotide
ggtaagaggaagcttacaatt

SEQ ID NO: 19431 - RNA, 21 nt, synthetic construct
  source 1..21: mol_type = other RNA; note = Description of Artificial Sequence: Synthetic oligonucleotide
gtaagaggaagcttacatatt

SEQ ID NO: 19432 - RNA, 21 nt, synthetic construct
  source 1..21: mol_type = other RNA; note = Description of Artificial Sequence: Synthetic oligonucleotide
taagaggaagcttacattatt

SEQ ID NO: 19433 - RNA, 21 nt, synthetic construct
  source 1..21: mol_type = other RNA; note = Description of Artificial Sequence: Synthetic oligonucleotide
aagaggaagcttacattaatt

SEQ ID NO: 19434 - RNA, 21 nt, synthetic construct
  source 1..21: mol_type = other RNA; note = Description of Artificial Sequence: Synthetic oligonucleotide
agaggaagcttacattacatt

SEQ ID NO: 19435 - RNA, 21 nt, synthetic construct
  source 1..21: mol_type = other RNA; note = Description of Artificial Sequence: Synthetic oligonucleotide
gaggaagcttacattacaatt

SEQ ID NO: 19436 - RNA, 21 nt, synthetic construct
  source 1..21: mol_type = other RNA; note = Description of Artificial Sequence: Synthetic oligonucleotide
aggaagcttacattacatatt

SEQ ID NO: 19437 - RNA, 21 nt, synthetic construct
  source 1..21: mol_type = other RNA; note = Description of Artificial Sequence: Synthetic oligonucleotide
ggaagcttacattacatgatt

SEQ ID NO: 19438 - RNA, 21 nt, synthetic construct
  source 1..21: mol_type = other RNA; note = Description of Artificial Sequence: Synthetic oligonucleotide
gaagcttacattacatgtatt

SEQ ID NO: 19439 - RNA, 21 nt, synthetic construct
  source 1..21: mol_type = other RNA; note = Description of Artificial Sequence: Synthetic oligonucleotide
aagcttacattacatgtcatt

SEQ ID NO: 19440 - RNA, 21 nt, synthetic construct
  source 1..21: mol_type = other RNA; note = Description of Artificial Sequence: Synthetic oligonucleotide
agcttacattacatgtccatt

SEQ ID NO: 19441 - RNA, 21 nt, synthetic construct
  source 1..21: mol_type = other RNA; note = Description of Artificial Sequence: Synthetic oligonucleotide
gcttacattacatgtccaatt

SEQ ID NO: 19442 - RNA, 21 nt, synthetic construct
  source 1..21: mol_type = other RNA; note = Description of Artificial Sequence: Synthetic oligonucleotide
cttacattacatgtccagatt

SEQ ID NO: 19443 - RNA, 21 nt, synthetic construct
  source 1..21: mol_type = other RNA; note = Description of Artificial Sequence: Synthetic oligonucleotide
ttacattacatgtccagtatt

SEQ ID NO: 19444 - RNA, 21 nt, synthetic construct
  source 1..21: mol_type = other RNA; note = Description of Artificial Sequence: Synthetic oligonucleotide
tacattacatgtccagtcatt

SEQ ID NO: 19445 - RNA, 21 nt, synthetic construct
  source 1..21: mol_type = other RNA; note = Description of Artificial Sequence: Synthetic oligonucleotide
acattacatgtccagtccatt

SEQ ID NO: 19446 - RNA, 21 nt, synthetic construct
  source 1..21: mol_type = other RNA; note = Description of Artificial Sequence: Synthetic oligonucleotide
cattacatgtccagtccaatt

SEQ ID NO: 19447 - RNA, 21 nt, synthetic construct
  source 1..21: mol_type = other RNA; note = Description of Artificial Sequence: Synthetic oligonucleotide
attacatgtccagtccacatt

SEQ ID NO: 19448 - RNA, 21 nt, synthetic construct
  source 1..21: mol_type = other RNA; note = Description of Artificial Sequence: Synthetic oligonucleotide
ttacatgtccagtccacaatt

SEQ ID NO: 19449 - RNA, 21 nt, synthetic construct
  source 1..21: mol_type = other RNA; note = Description of Artificial Sequence: Synthetic oligonucleotide
tacatgtccagtccacatatt

SEQ ID NO: 19450 - RNA, 21 nt, synthetic construct
  source 1..21: mol_type = other RNA; note = Description of Artificial Sequence: Synthetic oligonucleotide
acatgtccagtccacattatt

SEQ ID NO: 19451 - RNA, 21 nt, synthetic construct
  source 1..21: mol_type = other RNA; note = Description of Artificial Sequence: Synthetic oligonucleotide
catgtccagtccacatttatt

SEQ ID NO: 19452 - RNA, 21 nt, synthetic construct
  source 1..21: mol_type = other RNA; note = Description of Artificial Sequence: Synthetic oligonucleotide
atgtccagtccacatttaatt

SEQ ID NO: 19453 - RNA, 21 nt, synthetic construct
  source 1..21: mol_type = other RNA; note = Description of Artificial Sequence: Synthetic oligonucleotide
tgtccagtccacatttaaatt

SEQ ID NO: 19454 - RNA, 21 nt, synthetic construct
  source 1..21: mol_type = other RNA; note = Description of Artificial Sequence: Synthetic oligonucleotide
gtccagtccacatttaaaatt

SEQ ID NO: 19455 - RNA, 21 nt, synthetic construct
  source 1..21: mol_type = other RNA; note = Description of Artificial Sequence: Synthetic oligonucleotide
tccagtccacatttaaagatt

SEQ ID NO: 19456 - RNA, 21 nt, synthetic construct
  source 1..21: mol_type = other RNA; note = Description of Artificial Sequence: Synthetic oligonucleotide
ccagtccacatttaaagaatt

SEQ ID NO: 19457 - RNA, 21 nt, synthetic construct
  source 1..21: mol_type = other RNA; note = Description of Artificial Sequence: Synthetic oligonucleotide
cagtccacatttaaagagatt

SEQ ID NO: 19458 - RNA, 21 nt, synthetic construct
  source 1..21: mol_type = other RNA; note = Description of Artificial Sequence: Synthetic oligonucleotide
agtccacatttaaagagcatt

SEQ ID NO: 19459 - RNA, 21 nt, synthetic construct
  source 1..21: mol_type = other RNA; note = Description of Artificial Sequence: Synthetic oligonucleotide
gtccacatttaaagagcaatt

SEQ ID NO: 19460 - RNA, 21 nt, synthetic construct
  source 1..21: mol_type = other RNA; note = Description of Artificial Sequence: Synthetic oligonucleotide
tccacatttaaagagcacatt

SEQ ID NO: 19461 - RNA, 21 nt, synthetic construct
  source 1..21: mol_type = other RNA; note = Description of Artificial Sequence: Synthetic oligonucleotide
ccacatttaaagagcactatt

SEQ ID NO: 19462 - RNA, 21 nt, synthetic construct
  source 1..21: mol_type = other RNA; note = Description of Artificial Sequence: Synthetic oligonucleotide
cacatttaaagagcacttatt

SEQ ID NO: 19463 - RNA, 21 nt, synthetic construct
  source 1..21: mol_type = other RNA; note = Description of Artificial Sequence: Synthetic oligonucleotide
acatttaaagagcacttaatt

SEQ ID NO: 19464 - RNA, 21 nt, synthetic construct
  source 1..21: mol_type = other RNA; note = Description of Artificial Sequence: Synthetic oligonucleotide
catttaaagagcacttacatt

SEQ ID NO: 19465 - RNA, 21 nt, synthetic construct
  source 1..21: mol_type = other RNA; note = Description of Artificial Sequence: Synthetic oligonucleotide
atttaaagagcacttactatt

SEQ ID NO: 19466 - RNA, 21 nt, synthetic construct
  source 1..21: mol_type = other RNA; note = Description of Artificial Sequence: Synthetic oligonucleotide
tttaaagagcacttactgatt

SEQ ID NO: 19467 - RNA, 21 nt, synthetic construct
  source 1..21: mol_type = other RNA; note = Description of Artificial Sequence: Synthetic oligonucleotide
ttaaagagcacttactgtatt

SEQ ID NO: 19468 - RNA, 21 nt, synthetic construct
  source 1..21: mol_type = other RNA; note = Description of Artificial Sequence: Synthetic oligonucleotide
taaagagcacttactgtgatt

SEQ ID NO: 19469 - RNA, 21 nt, synthetic construct
  source 1..21: mol_type = other RNA; note = Description of Artificial Sequence: Synthetic oligonucleotide
aaagagcacttactgtggatt

SEQ ID NO: 19470 - RNA, 21 nt, synthetic construct
  source 1..21: mol_type = other RNA; note = Description of Artificial Sequence: Synthetic oligonucleotide
aagagcacttactgtggaatt

SEQ ID NO: 19471 - RNA, 21 nt, synthetic construct
  source 1..21: mol_type = other RNA; note = Description of Artificial Sequence: Synthetic oligonucleotide
agagcacttactgtggaaatt

SEQ ID NO: 19472 - RNA, 21 nt, synthetic construct
  source 1..21: mol_type = other RNA; note = Description of Artificial Sequence: Synthetic oligonucleotide
gagcacttactgtggaacatt

SEQ ID NO: 19473 - RNA, 21 nt, synthetic construct
  source 1..21: mol_type = other RNA; note = Description of Artificial Sequence: Synthetic oligonucleotide
agcacttactgtggaacaatt

SEQ ID NO: 19474 - RNA, 21 nt, synthetic construct
  source 1..21: mol_type = other RNA; note = Description of Artificial Sequence: Synthetic oligonucleotide
gcacttactgtggaacaaatt

SEQ ID NO: 19475 - RNA, 21 nt, synthetic construct
  source 1..21: mol_type = other RNA; note = Description of Artificial Sequence: Synthetic oligonucleotide
cacttactgtggaacaagatt

SEQ ID NO: 19476 - RNA, 21 nt, synthetic construct
  source 1..21: mol_type = other RNA; note = Description of Artificial Sequence: Synthetic oligonucleotide
acttactgtggaacaagcatt

SEQ ID NO: 19477 - RNA, 21 nt, synthetic construct
  source 1..21: mol_type = other RNA; note = Description of Artificial Sequence: Synthetic oligonucleotide
cttactgtggaacaagccatt

SEQ ID NO: 19478 - RNA, 21 nt, synthetic construct
  source 1..21: mol_type = other RNA; note = Description of Artificial Sequence: Synthetic oligonucleotide
ttactgtggaacaagcctatt

SEQ ID NO: 19479 - RNA, 21 nt, synthetic construct
  source 1..21: mol_type = other RNA; note = Description of Artificial Sequence: Synthetic oligonucleotide
tactgtggaacaagccttatt

SEQ ID NO: 19480 - RNA, 21 nt, synthetic construct
  source 1..21: mol_type = other RNA; note = Description of Artificial Sequence: Synthetic oligonucleotide
actgtggaacaagccttcatt

SEQ ID NO: 19481 - RNA, 21 nt, synthetic construct
  source 1..21: mol_type = other RNA; note = Description of Artificial Sequence: Synthetic oligonucleotide
ctgtggaacaagccttcaatt

SEQ ID NO: 19482 - RNA, 21 nt, synthetic construct
  source 1..21: mol_type = other RNA; note = Description of Artificial Sequence: Synthetic oligonucleotide
tgtggaacaagccttcagatt

SEQ ID NO: 19483 - RNA, 21 nt, synthetic construct
  source 1..21: mol_type = other RNA; note = Description of Artificial Sequence: Synthetic oligonucleotide
gtggaacaagccttcagcatt

SEQ ID NO: 19484 - RNA, 21 nt, synthetic construct
  source 1..21: mol_type = other RNA; note = Description of Artificial Sequence: Synthetic oligonucleotide
tggaacaagccttcagccatt

SEQ ID NO: 19485 - RNA, 21 nt, synthetic construct
  source 1..21: mol_type = other RNA; note = Description of Artificial Sequence: Synthetic oligonucleotide
ggaacaagccttcagccaatt

SEQ ID NO: 19486 - RNA, 21 nt, synthetic construct
  source 1..21: mol_type = other RNA; note = Description of Artificial Sequence: Synthetic oligonucleotide
gaacaagccttcagccaaatt

SEQ ID NO: 19487 - RNA, 21 nt, synthetic construct
  source 1..21: mol_type = other RNA; note = Description of Artificial Sequence: Synthetic oligonucleotide
aacaagccttcagccaaaatt

SEQ ID NO: 19488 - RNA, 21 nt, synthetic construct
  source 1..21: mol_type = other RNA; note = Description of Artificial Sequence: Synthetic oligonucleotide
acaagccttcagccaaacatt

SEQ ID NO: 19489 - RNA, 21 nt, synthetic construct
  source 1..21: mol_type = other RNA; note = Description of Artificial Sequence: Synthetic oligonucleotide
caagccttcagccaaacaatt

SEQ ID NO: 19490 - RNA, 21 nt, synthetic construct
  source 1..21: mol_type = other RNA; note = Description of Artificial Sequence: Synthetic oligonucleotide
aagccttcagccaaacaaatt

SEQ ID NO: 19491 - RNA, 21 nt, synthetic construct
  source 1..21: mol_type = other RNA; note = Description of Artificial Sequence: Synthetic oligonucleotide
agccttcagccaaacaatatt

SEQ ID NO: 19492 - RNA, 21 nt, synthetic construct
  source 1..21: mol_type = other RNA; note = Description of Artificial Sequence: Synthetic oligonucleotide
gccttcagccaaacaatgatt

SEQ ID NO: 19493 - RNA, 21 nt, synthetic construct
  source 1..21: mol_type = other RNA; note = Description of Artificial Sequence: Synthetic oligonucleotide
ccttcagccaaacaatggatt

SEQ ID NO: 19494 - RNA, 21 nt, synthetic construct
  source 1..21: mol_type = other RNA; note = Description of Artificial Sequence: Synthetic oligonucleotide
cttcagccaaacaatgggatt

SEQ ID NO: 19495 - RNA, 21 nt, synthetic construct
  source 1..21: mol_type = other RNA; note = Description of Artificial Sequence: Synthetic oligonucleotide
ttcagccaaacaatggggatt

SEQ ID NO: 19496 - RNA, 21 nt, synthetic construct
  source 1..21: mol_type = other RNA; note = Description of Artificial Sequence: Synthetic oligonucleotide
tcagccaaacaatggggaatt

SEQ ID NO: 19497 - RNA, 21 nt, synthetic construct
  source 1..21: mol_type = other RNA; note = Description of Artificial Sequence: Synthetic oligonucleotide
cagccaaacaatggggatatt

SEQ ID NO: 19498 - RNA, 21 nt, synthetic construct
  source 1..21: mol_type = other RNA; note = Description of Artificial Sequence: Synthetic oligonucleotide
agccaaacaatggggataatt

SEQ ID NO: 19499 - RNA, 21 nt, synthetic construct
  source 1..21: mol_type = other RNA; note = Description of Artificial Sequence: Synthetic oligonucleotide
gccaaacaatggggatagatt

SEQ ID NO: 19500 - RNA, 21 nt, synthetic construct
  source 1..21: mol_type = other RNA; note = Description of Artificial Sequence: Synthetic oligonucleotide
ccaaacaatggggatagaatt

SEQ ID NO: 19501 - RNA, 21 nt, synthetic construct
  source 1..21: mol_type = other RNA; note = Description of Artificial Sequence: Synthetic oligonucleotide
caaacaatggggatagaaatt

SEQ ID NO: 19502 - RNA, 21 nt, synthetic construct
  source 1..21: mol_type = other RNA; note = Description of Artificial Sequence: Synthetic oligonucleotide
aaacaatggggatagaaaatt

SEQ ID NO: 19503 - RNA, 21 nt, synthetic construct
  source 1..21: mol_type = other RNA; note = Description of Artificial Sequence: Synthetic oligonucleotide
aacaatggggatagaaaaatt

SEQ ID NO: 19504 - RNA, 21 nt, synthetic construct
  source 1..21: mol_type = other RNA; note = Description of Artificial Sequence: Synthetic oligonucleotide
acaatggggatagaaaagatt

SEQ ID NO: 19505 - RNA, 21 nt, synthetic construct
  source 1..21: mol_type = other RNA; note = Description of Artificial Sequence: Synthetic oligonucleotide
caatggggatagaaaagtatt

SEQ ID NO: 19506 - RNA, 21 nt, synthetic construct
  source 1..21: mol_type = other RNA; note = Description of Artificial Sequence: Synthetic oligonucleotide
aatggggatagaaaagtaatt

SEQ ID NO: 19507 - RNA, 21 nt, synthetic construct
  source 1..21: mol_type = other RNA; note = Description of Artificial Sequence: Synthetic oligonucleotide
atggggatagaaaagtagatt

SEQ ID NO: 19508 - RNA, 21 nt, synthetic construct
  source 1..21: mol_type = other RNA; note = Description of Artificial Sequence: Synthetic oligonucleotide
tggggatagaaaagtaggatt

SEQ ID NO: 19509 - RNA, 21 nt, synthetic construct
  source 1..21: mol_type = other RNA; note = Description of Artificial Sequence: Synthetic oligonucleotide
ggggatagaaaagtaggtatt

SEQ ID NO: 19510 - RNA, 21 nt, synthetic construct
  source 1..21: mol_type = other RNA; note = Description of Artificial Sequence: Synthetic oligonucleotide
gggatagaaaagtaggtaatt

SEQ ID NO: 19511 - RNA, 21 nt, synthetic construct
  source 1..21: mol_type = other RNA; note = Description of Artificial Sequence: Synthetic oligonucleotide
ggatagaaaagtaggtaaatt

SEQ ID NO: 19512 - RNA, 21 nt, synthetic construct
  source 1..21: mol_type = other RNA; note = Description of Artificial Sequence: Synthetic oligonucleotide
gatagaaaagtaggtaagatt

SEQ ID NO: 19513 - RNA, 21 nt, synthetic construct
  source 1..21: mol_type = other RNA; note = Description of Artificial Sequence: Synthetic oligonucleotide
atagaaaagtaggtaagaatt

SEQ ID NO: 19514 - RNA, 21 nt, synthetic construct
  source 1..21: mol_type = other RNA; note = Description of Artificial Sequence: Synthetic oligonucleotide
tagaaaagtaggtaagacatt

SEQ ID NO: 19515 - RNA, 21 nt, synthetic construct
  source 1..21: mol_type = other RNA; note = Description of Artificial Sequence: Synthetic oligonucleotide
agaaaagtaggtaagactatt

SEQ ID NO: 19516 - RNA, 21 nt, synthetic construct
  source 1..21: mol_type = other RNA; note = Description of Artificial Sequence: Synthetic oligonucleotide
gaaaagtaggtaagactcatt

SEQ ID NO: 19517 - RNA, 21 nt, synthetic construct
  source 1..21: mol_type = other RNA; note = Description of Artificial Sequence: Synthetic oligonucleotide
aaaagtaggtaagactcaatt

SEQ ID NO: 19518 - RNA, 21 nt, synthetic construct
  source 1..21: mol_type = other RNA; note = Description of Artificial Sequence: Synthetic oligonucleotide
aaagtaggtaagactcagatt

SEQ ID NO: 19519 - RNA, 21 nt, synthetic construct
  source 1..21: mol_type = other RNA; note = Description of Artificial Sequence: Synthetic oligonucleotide
aagtaggtaagactcagcatt

SEQ ID NO: 19520 - RNA, 21 nt, synthetic construct
  source 1..21: mol_type = other RNA; note = Description of Artificial Sequence: Synthetic oligonucleotide
agtaggtaagactcagccatt

SEQ ID NO: 19521 - RNA, 21 nt, synthetic construct
  source 1..21: mol_type = other RNA; note = Description of Artificial Sequence: Synthetic oligonucleotide
gtaggtaagactcagcctatt

SEQ ID NO: 19522 - RNA, 21 nt, synthetic construct
  source 1..21: mol_type = other RNA; note = Description of Artificial Sequence: Synthetic oligonucleotide
taggtaagactcagccttatt

SEQ ID NO: 19523 - RNA, 21 nt, synthetic construct
  source 1..21: mol_type = other RNA; note = Description of Artificial Sequence: Synthetic oligonucleotide
aggtaagactcagcctttatt

SEQ ID NO: 19524 - RNA, 21 nt, synthetic construct
  source 1..21: mol_type = other RNA; note = Description of Artificial Sequence: Synthetic oligonucleotide
ggtaagactcagcctttgatt

SEQ ID NO: 19525 - RNA, 21 nt, synthetic construct
  source 1..21: mol_type = other RNA; note = Description of Artificial Sequence: Synthetic oligonucleotide
gtaagactcagcctttgtatt

SEQ ID NO: 19526 - RNA, 21 nt, synthetic construct
  source 1..21: mol_type = other RNA; note = Description of Artificial Sequence: Synthetic oligonucleotide
taagactcagcctttgtcatt

SEQ ID NO: 19527 - RNA, 21 nt, synthetic construct
  source 1..21: mol_type = other RNA; note = Description of Artificial Sequence: Synthetic oligonucleotide
aagactcagcctttgtccatt

SEQ ID NO: 19528 - RNA, 21 nt, synthetic construct
  source 1..21: mol_type = other RNA; note = Description of Artificial Sequence: Synthetic oligonucleotide
agactcagcctttgtccaatt

SEQ ID NO: 19529 - RNA, 21 nt, synthetic construct
  source 1..21: mol_type = other RNA; note = Description of Artificial Sequence: Synthetic oligonucleotide
gactcagcctttgtccagatt

SEQ ID NO: 19530 - RNA, 21 nt, synthetic construct
  source 1..21: mol_type = other RNA; note = Description of Artificial Sequence: Synthetic oligonucleotide
actcagcctttgtccagaatt

SEQ ID NO: 19531 - RNA, 21 nt, synthetic construct
  source 1..21: mol_type = other RNA; note = Description of Artificial Sequence: Synthetic oligonucleotide
ctcagcctttgtccagagatt

SEQ ID NO: 19532 - RNA, 21 nt, synthetic construct
  source 1..21: mol_type = other RNA; note = Description of Artificial Sequence: Synthetic oligonucleotide
tcagcctttgtccagagaatt

SEQ ID NO: 19533 - RNA, 21 nt, synthetic construct
  source 1..21: mol_type = other RNA; note = Description of Artificial Sequence: Synthetic oligonucleotide
cagcctttgtccagagaaatt

SEQ ID NO: 19534 - RNA, 21 nt, synthetic construct
  source 1..21: mol_type = other RNA; note = Description of Artificial Sequence: Synthetic oligonucleotide
agcctttgtccagagaagatt

SEQ ID NO: 19535 - RNA, 21 nt, synthetic construct
  source 1..21: mol_type = other RNA; note = Description of Artificial Sequence: Synthetic oligonucleotide
gcctttgtccagagaagcatt

SEQ ID NO: 19536 - RNA, 21 nt, synthetic construct
  source 1..21: mol_type = other RNA; note = Description of Artificial Sequence: Synthetic oligonucleotide
cctttgtccagagaagctatt

SEQ ID NO: 19537 - RNA, 21 nt, synthetic construct
  source 1..21: mol_type = other RNA; note = Description of Artificial Sequence: Synthetic oligonucleotide
ctttgtccagagaagctcatt

SEQ ID NO: 19538 - RNA, 21 nt, synthetic construct
  source 1..21: mol_type = other RNA; note = Description of Artificial Sequence: Synthetic oligonucleotide
tttgtccagagaagctcaatt

SEQ ID NO: 19539 - RNA, 21 nt, synthetic construct
  source 1..21: mol_type = other RNA; note = Description of Artificial Sequence: Synthetic oligonucleotide
ttgtccagagaagctcagatt

SEQ ID NO: 19540 - RNA, 21 nt, synthetic construct
  source 1..21: mol_type = other RNA; note = Description of Artificial Sequence: Synthetic oligonucleotide
tgtccagagaagctcaggatt

SEQ ID NO: 19541 - RNA, 21 nt, synthetic construct
  source 1..21: mol_type = other RNA; note = Description of Artificial Sequence: Synthetic oligonucleotide
gtccagagaagctcagggatt

SEQ ID NO: 19542 - RNA, 21 nt, synthetic construct
  source 1..21: mol_type = other RNA; note = Description of Artificial Sequence: Synthetic oligonucleotide
tccagagaagctcagggtatt

SEQ ID NO: 19543 - RNA, 21 nt, synthetic construct
  source 1..21: mol_type = other RNA; note = Description of Artificial Sequence: Synthetic oligonucleotide
ccagagaagctcagggtaatt

SEQ ID NO: 19544 - RNA, 21 nt, synthetic construct
  source 1..21: mol_type = other RNA; note = Description of Artificial Sequence: Synthetic oligonucleotide
cagagaagctcagggtatatt

SEQ ID NO: 19545 - RNA, 21 nt, synthetic construct
  source 1..21: mol_type = other RNA; note = Description of Artificial Sequence: Synthetic oligonucleotide
agagaagctcagggtataatt

SEQ ID NO: 19546 - RNA, 21 nt, synthetic construct
  source 1..21: mol_type = other RNA; note = Description of Artificial Sequence: Synthetic oligonucleotide
gagaagctcagggtatagatt

SEQ ID NO: 19547 - RNA, 21 nt, synthetic construct
  source 1..21: mol_type = other RNA; note = Description of Artificial Sequence: Synthetic oligonucleotide
agaagctcagggtatagcatt

SEQ ID NO: 19548 - RNA, 21 nt, synthetic construct
  source 1..21: mol_type = other RNA; note = Description of Artificial Sequence: Synthetic oligonucleotide
gaagctcagggtatagctatt

SEQ ID NO: 19549 - RNA, 21 nt, synthetic construct
  source 1..21: mol_type = other RNA; note = Description of Artificial Sequence: Synthetic oligonucleotide
aagctcagggtatagctgatt

SEQ ID NO: 19550 - RNA, 21 nt, synthetic construct
  source 1..21: mol_type = other RNA; note = Description of Artificial Sequence: Synthetic oligonucleotide
agctcagggtatagctgaatt

SEQ ID NO: 19551 - RNA, 21 nt, synthetic construct
  source 1..21: mol_type = other RNA; note = Description of Artificial Sequence: Synthetic oligonucleotide
gctcagggtatagctgaaatt

SEQ ID NO: 19552 - RNA, 21 nt, synthetic construct
  source 1..21: mol_type = other RNA; note = Description of Artificial Sequence: Synthetic oligonucleotide
ctcagggtatagctgaatatt

SEQ ID NO: 19553 - RNA, 21 nt, synthetic construct
  source 1..21: mol_type = other RNA; note = Description of Artificial Sequence: Synthetic oligonucleotide
tcagggtatagctgaataatt

SEQ ID NO: 19554 - RNA, 21 nt, synthetic construct
  source 1..21: mol_type = other RNA; note = Description of Artificial Sequence: Synthetic oligonucleotide
cagggtatagctgaatagatt

SEQ ID NO: 19555 - RNA, 21 nt, synthetic construct
  source 1..21: mol_type = other RNA; note = Description of Artificial Sequence: Synthetic oligonucleotide
agggtatagctgaataggatt

SEQ ID NO: 19556 - RNA, 21 nt, synthetic construct
  source 1..21: mol_type = other RNA; note = Description of Artificial Sequence: Synthetic oligonucleotide
gggtatagctgaataggcatt

SEQ ID NO: 19557 - RNA, 21 nt, synthetic construct
  source 1..21: mol_type = other RNA; note = Description of Artificial Sequence: Synthetic oligonucleotide
ggtatagctgaataggcaatt

SEQ ID NO: 19558 - RNA, 21 nt, synthetic construct
  source 1..21: mol_type = other RNA; note = Description of Artificial Sequence: Synthetic oligonucleotide
gtatagctgaataggcagatt

SEQ ID NO: 19559 - RNA, 21 nt, synthetic construct
  source 1..21: mol_type = other RNA; note = Description of Artificial Sequence: Synthetic oligonucleotide
tatagctgaataggcagtatt

SEQ ID NO: 19560 - RNA, 21 nt, synthetic construct
  source 1..21: mol_type = other RNA; note = Description of Artificial Sequence: Synthetic oligonucleotide
atagctgaataggcagttatt

SEQ ID NO: 19561 - RNA, 21 nt, synthetic construct
  source 1..21: mol_type = other RNA; note = Description of Artificial Sequence: Synthetic oligonucleotide
tagctgaataggcagtttatt

SEQ ID NO: 19562 - RNA, 21 nt, synthetic construct
  source 1..21: mol_type = other RNA; note = Description of Artificial Sequence: Synthetic oligonucleotide
agctgaataggcagtttcatt

SEQ ID NO: 19563 - RNA, 21 nt, synthetic construct
  source 1..21: mol_type = other RNA; note = Description of Artificial Sequence: Synthetic oligonucleotide
gctgaataggcagtttctatt

SEQ ID NO: 19564 - RNA, 21 nt, synthetic construct
  source 1..21: mol_type = other RNA; note = Description of Artificial Sequence: Synthetic oligonucleotide
ctgaataggcagtttcttatt

SEQ ID NO: 19565 - RNA, 21 nt, synthetic construct
  source 1..21: mol_type = other RNA; note = Description of Artificial Sequence: Synthetic oligonucleotide
tgaataggcagtttctttatt

SEQ ID NO: 19566 - RNA, 21 nt, synthetic construct
  source 1..21: mol_type = other RNA; note = Description of Artificial Sequence: Synthetic oligonucleotide
gaataggcagtttcttttatt

SEQ ID NO: 19567 - RNA, 21 nt, synthetic construct
  source 1..21: mol_type = other RNA; note = Description of Artificial Sequence: Synthetic oligonucleotide
aataggcagtttcttttgatt

SEQ ID NO: 19568 - RNA, 21 nt, synthetic construct
  source 1..21: mol_type = other RNA; note = Description of Artificial Sequence: Synthetic oligonucleotide
ataggcagtttcttttgtatt

SEQ ID NO: 19569 - RNA, 21 nt, synthetic construct
  source 1..21: mol_type = other RNA; note = Description of Artificial Sequence: Synthetic oligonucleotide
taggcagtttcttttgtcatt

SEQ ID NO: 19570 - RNA, 21 nt, synthetic construct
  source 1..21: mol_type = other RNA; note = Description of Artificial Sequence: Synthetic oligonucleotide
aggcagtttcttttgtccatt

SEQ ID NO: 19571 - RNA, 21 nt, synthetic construct
  source 1..21: mol_type = other RNA; note = Description of Artificial Sequence: Synthetic oligonucleotide
ggcagtttcttttgtcctatt

SEQ ID NO: 19572 - RNA, 21 nt, synthetic construct
  source 1..21: mol_type = other RNA; note = Description of Artificial Sequence: Synthetic oligonucleotide
gcagtttcttttgtcctgatt

SEQ ID NO: 19573 - RNA, 21 nt, synthetic construct
  source 1..21: mol_type = other RNA; note = Description of Artificial Sequence: Synthetic oligonucleotide
cagtttcttttgtcctgaatt

SEQ ID NO: 19574 - RNA, 21 nt, synthetic construct
  source 1..21: mol_type = other RNA; note = Description of Artificial Sequence: Synthetic oligonucleotide
agtttcttttgtcctgagatt

SEQ ID NO: 19575 - RNA, 21 nt, synthetic construct
  source 1..21: mol_type = other RNA; note = Description of Artificial Sequence: Synthetic oligonucleotide
gtttcttttgtcctgaggatt

SEQ ID NO: 19576 - RNA, 21 nt, synthetic construct
  source 1..21: mol_type = other RNA; note = Description of Artificial Sequence: Synthetic oligonucleotide
tttcttttgtcctgaggaatt

SEQ ID NO: 19577 - RNA, 21 nt, synthetic construct
  source 1..21: mol_type = other RNA; note = Description of Artificial Sequence: Synthetic oligonucleotide
ttcttttgtcctgaggaaatt

SEQ ID NO: 19578 - RNA, 21 nt, synthetic construct
  source 1..21: mol_type = other RNA; note = Description of Artificial Sequence: Synthetic oligonucleotide
tcttttgtcctgaggaaaatt

SEQ ID NO: 19579 - RNA, 21 nt, synthetic construct
  source 1..21: mol_type = other RNA; note = Description of Artificial Sequence: Synthetic oligonucleotide
cttttgtcctgaggaaaaatt

SEQ ID NO: 19580 - RNA, 21 nt, synthetic construct
  source 1..21: mol_type = other RNA; note = Description of Artificial Sequence: Synthetic oligonucleotide
ttttgtcctgaggaaaatatt

SEQ ID NO: 19581 - RNA, 21 nt, synthetic construct
  source 1..21: mol_type = other RNA; note = Description of Artificial Sequence: Synthetic oligonucleotide
tttgtcctgaggaaaatcatt

SEQ ID NO: 19582 - RNA, 21 nt, synthetic construct
  source 1..21: mol_type = other RNA; note = Description of Artificial Sequence: Synthetic oligonucleotide
ttgtcctgaggaaaatcaatt

SEQ ID NO: 19583 - RNA, 21 nt, synthetic construct
  source 1..21: mol_type = other RNA; note = Description of Artificial Sequence: Synthetic oligonucleotide
tgtcctgaggaaaatcagatt

SEQ ID NO: 19584 - RNA, 21 nt, synthetic construct
  source 1..21: mol_type = other RNA; note = Description of Artificial Sequence: Synthetic oligonucleotide
gtcctgaggaaaatcaggatt

SEQ ID NO: 19585 - RNA, 21 nt, synthetic construct
  source 1..21: mol_type = other RNA; note = Description of Artificial Sequence: Synthetic oligonucleotide
tcctgaggaaaatcaggaatt

SEQ ID NO: 19586 - RNA, 21 nt, synthetic construct
  source 1..21: mol_type = other RNA; note = Description of Artificial Sequence: Synthetic oligonucleotide
cctgaggaaaatcaggacatt

SEQ ID NO: 19587 - RNA, 21 nt, synthetic construct
  source 1..21: mol_type = other RNA; note = Description of Artificial Sequence: Synthetic oligonucleotide
ctgaggaaaatcaggacaatt

SEQ ID NO: 19588 - RNA, 21 nt, synthetic construct
  source 1..21: mol_type = other RNA; note = Description of Artificial Sequence: Synthetic oligonucleotide
tgaggaaaatcaggacatatt

SEQ ID NO: 19589 - RNA, 21 nt, synthetic construct
  source 1..21: mol_type = other RNA; note = Description of Artificial Sequence: Synthetic oligonucleotide
gaggaaaatcaggacatgatt

SEQ ID NO: 19590 - RNA, 21 nt, synthetic construct
  source 1..21: mol_type = other RNA; note = Description of Artificial Sequence: Synthetic oligonucleotide
aggaaaatcaggacatgcatt

SEQ ID NO: 19591 - RNA, 21 nt, synthetic construct
  source 1..21: mol_type = other RNA; note = Description of Artificial Sequence: Synthetic oligonucleotide
ggaaaatcaggacatgccatt

SEQ ID NO: 19592 - RNA, 21 nt, synthetic construct
  source 1..21: mol_type = other RNA; note = Description of Artificial Sequence: Synthetic oligonucleotide
gaaaatcaggacatgcctatt

SEQ ID NO: 19593 - RNA, 21 nt, synthetic construct
  source 1..21: mol_type = other RNA; note = Description of Artificial Sequence: Synthetic oligonucleotide
aaaatcaggacatgcctgatt

SEQ ID NO: 19594 - RNA, 21 nt, synthetic construct
  source 1..21: mol_type = other RNA; note = Description of Artificial Sequence: Synthetic oligonucleotide
aaatcaggacatgcctgcatt

SEQ ID NO: 19595 - RNA, 21 nt, synthetic construct
  source 1..21: mol_type = other RNA; note = Description of Artificial Sequence: Synthetic oligonucleotide
aatcaggacatgcctgctatt

SEQ ID NO: 19596 - RNA, 21 nt, synthetic construct
  source 1..21: mol_type = other RNA; note = Description of Artificial Sequence: Synthetic oligonucleotide
atcaggacatgcctgcttatt

SEQ ID NO: 19597 - RNA, 21 nt, synthetic construct
  source 1..21: mol_type = other RNA; note = Description of Artificial Sequence: Synthetic oligonucleotide
tcaggacatgcctgctttatt

SEQ ID NO: 19598 - RNA, 21 nt, synthetic construct
  source 1..21: mol_type = other RNA; note = Description of Artificial Sequence: Synthetic oligonucleotide
caggacatgcctgctttcatt

SEQ ID NO: 19599 - RNA, 21 nt, synthetic construct
  source 1..21: mol_type = other RNA; note = Description of Artificial Sequence: Synthetic oligonucleotide
aggacatgcctgctttctatt

SEQ ID NO: 19600 - RNA, 21 nt, synthetic construct
  source 1..21: mol_type = other RNA; note = Description of Artificial Sequence: Synthetic oligonucleotide
ggacatgcctgctttctaatt

SEQ ID NO: 19601 - RNA, 21 nt, synthetic construct
  source 1..21: mol_type = other RNA; note = Description of Artificial Sequence: Synthetic oligonucleotide
gacatgcctgctttctaaatt

SEQ ID NO: 19602 - RNA, 21 nt, synthetic construct
  source 1..21: mol_type = other RNA; note = Description of Artificial Sequence: Synthetic oligonucleotide
acatgcctgctttctaaaatt

SEQ ID NO: 19603 - RNA, 21 nt, synthetic construct
  source 1..21: mol_type = other RNA; note = Description of Artificial Sequence: Synthetic oligonucleotide
catgcctgctttctaaaaatt

SEQ ID NO: 19604 - RNA, 21 nt, synthetic construct
  source 1..21: mol_type = other RNA; note = Description of Artificial Sequence: Synthetic oligonucleotide
atgcctgctttctaaaaaatt

SEQ ID NO: 19605 - RNA, 21 nt, synthetic construct
  source 1..21: mol_type = other RNA; note = Description of Artificial Sequence: Synthetic oligonucleotide
tgcctgctttctaaaaatatt

SEQ ID NO: 19606 - RNA, 21 nt, synthetic construct
  source 1..21: mol_type = other RNA; note = Description of Artificial Sequence: Synthetic oligonucleotide
gcctgctttctaaaaatcatt

SEQ ID NO: 19607 - RNA, 21 nt, synthetic construct
  source 1..21: mol_type = other RNA; note = Description of Artificial Sequence: Synthetic oligonucleotide
cctgctttctaaaaatctatt

SEQ ID NO: 19608 - RNA, 21 nt, synthetic construct
  source 1..21: mol_type = other RNA; note = Description of Artificial Sequence: Synthetic oligonucleotide
ctgctttctaaaaatcttatt

SEQ ID NO: 19609 - RNA, 21 nt, synthetic construct
  source 1..21: mol_type = other RNA; note = Description of Artificial Sequence: Synthetic oligonucleotide
tgctttctaaaaatcttcatt

SEQ ID NO: 19610 - RNA, 21 nt, synthetic construct
  source 1..21: mol_type = other RNA; note = Description of Artificial Sequence: Synthetic oligonucleotide
gctttctaaaaatcttccatt

SEQ ID NO: 19611 - RNA, 21 nt, synthetic construct
  source 1..21: mol_type = other RNA; note = Description of Artificial Sequence: Synthetic oligonucleotide
ctttctaaaaatcttcctatt

SEQ ID NO: 19612 - RNA, 21 nt, synthetic construct
  source 1..21: mol_type = other RNA; note = Description of Artificial Sequence: Synthetic oligonucleotide
tttctaaaaatcttcctcatt

SEQ ID NO: 19613 - RNA, 21 nt, synthetic construct
  source 1..21: mol_type = other RNA; note = Description of Artificial Sequence: Synthetic oligonucleotide
ttctaaaaatcttcctctatt

SEQ ID NO: 19614 - RNA, 21 nt, synthetic construct
  source 1..21: mol_type = other RNA; note = Description of Artificial Sequence: Synthetic oligonucleotide
tctaaaaatcttcctctgatt

SEQ ID NO: 19615 - RNA, 21 nt, synthetic construct
  source 1..21: mol_type = other RNA; note = Description of Artificial Sequence: Synthetic oligonucleotide
ctaaaaatcttcctctgaatt

SEQ ID NO: 19616 - RNA, 21 nt, synthetic construct
  source 1..21: mol_type = other RNA; note = Description of Artificial Sequence: Synthetic oligonucleotide
taaaaatcttcctctgaaatt

SEQ ID NO: 19617 - RNA, 21 nt, synthetic construct
  source 1..21: mol_type = other RNA; note = Description of Artificial Sequence: Synthetic oligonucleotide
aaaaatcttcctctgaagatt

SEQ ID NO: 19618 - RNA, 21 nt, synthetic construct
  source 1..21: mol_type = other RNA; note = Description of Artificial Sequence: Synthetic oligonucleotide
aaaatcttcctctgaagaatt

SEQ ID NO: 19619 - RNA, 21 nt, synthetic construct
  source 1..21: mol_type = other RNA; note = Description of Artificial Sequence: Synthetic oligonucleotide
aaatcttcctctgaagacatt

SEQ ID NO: 19620 - RNA, 21 nt, synthetic construct
  source 1..21: mol_type = other RNA; note = Description of Artificial Sequence: Synthetic oligonucleotide
aatcttcctctgaagaccatt

SEQ ID NO: 19621 - RNA, 21 nt, synthetic construct
  source 1..21: mol_type = other RNA; note = Description of Artificial Sequence: Synthetic oligonucleotide
atcttcctctgaagacctatt

SEQ ID NO: 19622 - RNA, 21 nt, synthetic construct
  source 1..21: mol_type = other RNA; note = Description of Artificial Sequence: Synthetic oligonucleotide
tcttcctctgaagacctgatt

SEQ ID NO: 19623 - RNA, 21 nt, synthetic construct
  source 1..21: mol_type = other RNA; note = Description of Artificial Sequence: Synthetic oligonucleotide
cttcctctgaagacctgaatt

SEQ ID NO: 19624 - RNA, 21 nt, synthetic construct
  source 1..21: mol_type = other RNA; note = Description of Artificial Sequence: Synthetic oligonucleotide
ttcctctgaagacctgacatt

SEQ ID NO: 19625 - RNA, 21 nt, synthetic construct
  source 1..21: mol_type = other RNA; note = Description of Artificial Sequence: Synthetic oligonucleotide
tcctctgaagacctgaccatt

SEQ ID NO: 19626 - RNA, 21 nt, synthetic construct
  source 1..21: mol_type = other RNA; note = Description of Artificial Sequence: Synthetic oligonucleotide
cctctgaagacctgacccatt

SEQ ID NO: 19627 - RNA, 21 nt, synthetic construct
  source 1..21: mol_type = other RNA; note = Description of Artificial Sequence: Synthetic oligonucleotide
ctctgaagacctgacccaatt

SEQ ID NO: 19628 - RNA, 21 nt, synthetic construct
  source 1..21: mol_type = other RNA; note = Description of Artificial Sequence: Synthetic oligonucleotide
tctgaagacctgacccaaatt

SEQ ID NO: 19629 - RNA, 21 nt, synthetic construct
  source 1..21: mol_type = other RNA; note = Description of Artificial Sequence: Synthetic oligonucleotide
ctgaagacctgacccaagatt

SEQ ID NO: 19630 - RNA, 21 nt, synthetic construct
  source 1..21: mol_type = other RNA; note = Description of Artificial Sequence: Synthetic oligonucleotide
tgaagacctgacccaagcatt

SEQ ID NO: 19631 - RNA, 21 nt, synthetic construct
  source 1..21: mol_type = other RNA; note = Description of Artificial Sequence: Synthetic oligonucleotide
gaagacctgacccaagctatt

SEQ ID NO: 19632 - RNA, 21 nt, synthetic construct
  source 1..21: mol_type = other RNA; note = Description of Artificial Sequence: Synthetic oligonucleotide
aagacctgacccaagctcatt

SEQ ID NO: 19633 - RNA, 21 nt, synthetic construct
  source 1..21: mol_type = other RNA; note = Description of Artificial Sequence: Synthetic oligonucleotide
agacctgacccaagctctatt

SEQ ID NO: 19634 - RNA, 21 nt, synthetic construct
  source 1..21: mol_type = other RNA; note = Description of Artificial Sequence: Synthetic oligonucleotide
gacctgacccaagctcttatt

SEQ ID NO: 19635 - RNA, 21 nt, synthetic construct
  source 1..21: mol_type = other RNA; note = Description of Artificial Sequence: Synthetic oligonucleotide
acctgacccaagctcttaatt

SEQ ID NO: 19636 - RNA, 21 nt, synthetic construct
  source 1..21: mol_type = other RNA; note = Description of Artificial Sequence: Synthetic oligonucleotide
cctgacccaagctcttaaatt

SEQ ID NO: 19637 - RNA, 21 nt, synthetic construct
  source 1..21: mol_type = other RNA; note = Description of Artificial Sequence: Synthetic oligonucleotide
ctgacccaagctcttaaaatt

SEQ ID NO: 19638 - RNA, 21 nt, synthetic construct
  source 1..21: mol_type = other RNA; note = Description of Artificial Sequence: Synthetic oligonucleotide
tgacccaagctcttaaatatt

SEQ ID NO: 19639 - RNA, 21 nt, synthetic construct
  source 1..21: mol_type = other RNA; note = Description of Artificial Sequence: Synthetic oligonucleotide
gacccaagctcttaaatgatt

SEQ ID NO: 19640 - RNA, 21 nt, synthetic construct
  source 1..21: mol_type = other RNA; note = Description of Artificial Sequence: Synthetic oligonucleotide
acccaagctcttaaatgcatt

SEQ ID NO: 19641 - RNA, 21 nt, synthetic construct
  source 1..21: mol_type = other RNA; note = Description of Artificial Sequence: Synthetic oligonucleotide
cccaagctcttaaatgctatt

SEQ ID NO: 19642 - RNA, 21 nt, synthetic construct
  source 1..21: mol_type = other RNA; note = Description of Artificial Sequence: Synthetic oligonucleotide
ccaagctcttaaatgctaatt

SEQ ID NO: 19643 - RNA, 21 nt, synthetic construct
  source 1..21: mol_type = other RNA; note = Description of Artificial Sequence: Synthetic oligonucleotide
caagctcttaaatgctatatt

SEQ ID NO: 19644 - RNA, 21 nt, synthetic construct
  source 1..21: mol_type = other RNA; note = Description of Artificial Sequence: Synthetic oligonucleotide
aagctcttaaatgctattatt

SEQ ID NO: 19645 - RNA, 21 nt, synthetic construct
  source 1..21: mol_type = other RNA; note = Description of Artificial Sequence: Synthetic oligonucleotide
agctcttaaatgctattgatt

SEQ ID NO: 19646 - RNA, 21 nt, synthetic construct
  source 1..21: mol_type = other RNA; note = Description of Artificial Sequence: Synthetic oligonucleotide
gctcttaaatgctattgtatt

SEQ ID NO: 19647 - RNA, 21 nt, synthetic construct
  source 1..21: mol_type = other RNA; note = Description of Artificial Sequence: Synthetic oligonucleotide
ctcttaaatgctattgtaatt

SEQ ID NO: 19648 - RNA, 21 nt, synthetic construct
  source 1..21: mol_type = other RNA; note = Description of Artificial Sequence: Synthetic oligonucleotide
tcttaaatgctattgtaaatt

SEQ ID NO: 19649 - RNA, 21 nt, synthetic construct
  source 1..21: mol_type = other RNA; note = Description of Artificial Sequence: Synthetic oligonucleotide
cttaaatgctattgtaagatt

SEQ ID NO: 19650 - RNA, 21 nt, synthetic construct
  source 1..21: mol_type = other RNA; note = Description of Artificial Sequence: Synthetic oligonucleotide
ttaaatgctattgtaagaatt

SEQ ID NO: 19651 - RNA, 21 nt, synthetic construct
  source 1..21: mol_type = other RNA; note = Description of Artificial Sequence: Synthetic oligonucleotide
taaatgctattgtaagagatt

SEQ ID NO: 19652 - RNA, 21 nt, synthetic construct
  source 1..21: mol_type = other RNA; note = Description of Artificial Sequence: Synthetic oligonucleotide
aaatgctattgtaagagaatt

SEQ ID NO: 19653 - RNA, 21 nt, synthetic construct
  source 1..21: mol_type = other RNA; note = Description of Artificial Sequence: Synthetic oligonucleotide
aatgctattgtaagagaaatt

SEQ ID NO: 19654 - RNA, 21 nt, synthetic construct
  source 1..21: mol_type = other RNA; note = Description of Artificial Sequence: Synthetic oligonucleotide
atgctattgtaagagaaaatt

SEQ ID NO: 19655 - RNA, 21 nt, synthetic construct
  source 1..21: mol_type = other RNA; note = Description of Artificial Sequence: Synthetic oligonucleotide
tgctattgtaagagaaatatt

SEQ ID NO: 19656 - RNA, 21 nt, synthetic construct
  source 1..21: mol_type = other RNA; note = Description of Artificial Sequence: Synthetic oligonucleotide
gctattgtaagagaaattatt

SEQ ID NO: 19657 - RNA, 21 nt, synthetic construct
  source 1..21: mol_type = other RNA; note = Description of Artificial Sequence: Synthetic oligonucleotide
ctattgtaagagaaatttatt

SEQ ID NO: 19658 - RNA, 21 nt, synthetic construct
  source 1..21: mol_type = other RNA; note = Description of Artificial Sequence: Synthetic oligonucleotide
tattgtaagagaaatttcatt

SEQ ID NO: 19659 - RNA, 21 nt, synthetic construct
  source 1..21: mol_type = other RNA; note = Description of Artificial Sequence: Synthetic oligonucleotide
attgtaagagaaatttctatt

SEQ ID NO: 19660 - RNA, 21 nt, synthetic construct
  source 1..21: mol_type = other RNA; note = Description of Artificial Sequence: Synthetic oligonucleotide
ttgtaagagaaatttcttatt

SEQ ID NO: 19661 - RNA, 21 nt, synthetic construct
  source 1..21: mol_type = other RNA; note = Description of Artificial Sequence: Synthetic oligonucleotide
tgtaagagaaatttctttatt

SEQ ID NO: 19662 - RNA, 21 nt, synthetic construct
  source 1..21: mol_type = other RNA; note = Description of Artificial Sequence: Synthetic oligonucleotide
gtaagagaaatttctttgatt

SEQ ID NO: 19663 - RNA, 21 nt, synthetic construct
  source 1..21: mol_type = other RNA; note = Description of Artificial Sequence: Synthetic oligonucleotide
taagagaaatttctttgtatt

SEQ ID NO: 19664 - RNA, 21 nt, synthetic construct
  source 1..21: mol_type = other RNA; note = Description of Artificial Sequence: Synthetic oligonucleotide
aagagaaatttctttgtcatt

SEQ ID NO: 19665 - RNA, 21 nt, synthetic construct
  source 1..21: mol_type = other RNA; note = Description of Artificial Sequence: Synthetic oligonucleotide
agagaaatttctttgtctatt

SEQ ID NO: 19666 - RNA, 21 nt, synthetic construct
  source 1..21: mol_type = other RNA; note = Description of Artificial Sequence: Synthetic oligonucleotide
gagaaatttctttgtctaatt

SEQ ID NO: 19667 - RNA, 21 nt, synthetic construct
  source 1..21: mol_type = other RNA; note = Description of Artificial Sequence: Synthetic oligonucleotide
agaaatttctttgtctatatt

SEQ ID NO: 19668 - RNA, 21 nt, synthetic construct
  source 1..21: mol_type = other RNA; note = Description of Artificial Sequence: Synthetic oligonucleotide
gaaatttctttgtctattatt

SEQ ID NO: 19669 - RNA, 21 nt, synthetic construct
  source 1..21: mol_type = other RNA; note = Description of Artificial Sequence: Synthetic oligonucleotide
aaatttctttgtctattaatt

SEQ ID NO: 19670 - RNA, 21 nt, synthetic construct
  source 1..21: mol_type = other RNA; note = Description of Artificial Sequence: Synthetic oligonucleotide
aatttctttgtctattaaatt

SEQ ID NO: 19671 - RNA, 21 nt, synthetic construct
  source 1..21: mol_type = other RNA; note = Description of Artificial Sequence: Synthetic oligonucleotide
atttctttgtctattaacatt

SEQ ID NO: 19672 - RNA, 21 nt, synthetic construct
  source 1..21: mol_type = other RNA; note = Description of Artificial Sequence: Synthetic oligonucleotide
tttctttgtctattaactatt

SEQ ID NO: 19673 - RNA, 21 nt, synthetic construct
  source 1..21: mol_type = other RNA; note = Description of Artificial Sequence: Synthetic oligonucleotide
ttctttgtctattaactcatt

SEQ ID NO: 19674 - RNA, 21 nt, synthetic construct
  source 1..21: mol_type = other RNA; note = Description of Artificial Sequence: Synthetic oligonucleotide
tctttgtctattaactccatt

SEQ ID NO: 19675 - RNA, 21 nt, synthetic construct
  source 1..21: mol_type = other RNA; note = Description of Artificial Sequence: Synthetic oligonucleotide
ctttgtctattaactccaatt

SEQ ID NO: 19676 - RNA, 21 nt, synthetic construct
  source 1..21: mol_type = other RNA; note = Description of Artificial Sequence: Synthetic oligonucleotide
tttgtctattaactccatatt

SEQ ID NO: 19677 - RNA, 21 nt, synthetic construct
  source 1..21: mol_type = other RNA; note = Description of Artificial Sequence: Synthetic oligonucleotide
ttgtctattaactccattatt

SEQ ID NO: 19678 - RNA, 21 nt, synthetic construct
  source 1..21: mol_type = other RNA; note = Description of Artificial Sequence: Synthetic oligonucleotide
tgtctattaactccatttatt

SEQ ID NO: 19679 - RNA, 21 nt, synthetic construct
  source 1..21: mol_type = other RNA; note = Description of Artificial Sequence: Synthetic oligonucleotide
gtctattaactccattttatt

SEQ ID NO: 19680 - RNA, 21 nt, synthetic construct
  source 1..21: mol_type = other RNA; note = Description of Artificial Sequence: Synthetic oligonucleotide
tctattaactccattttaatt

SEQ ID NO: 19681 - RNA, 21 nt, synthetic construct
  source 1..21: mol_type = other RNA; note = Description of Artificial Sequence: Synthetic oligonucleotide
ctattaactccattttagatt

SEQ ID NO: 19682 - RNA, 21 nt, synthetic construct
  source 1..21: mol_type = other RNA; note = Description of Artificial Sequence: Synthetic oligonucleotide
tattaactccattttagtatt

SEQ ID NO: 19683 - RNA, 21 nt, synthetic construct
  source 1..21: mol_type = other RNA; note = Description of Artificial Sequence: Synthetic oligonucleotide
attaactccattttagtaatt

SEQ ID NO: 19684 - RNA, 21 nt, synthetic construct
  source 1..21: mol_type = other RNA; note = Description of Artificial Sequence: Synthetic oligonucleotide
ttaactccattttagtagatt

SEQ ID NO: 19685 - RNA, 21 nt, synthetic construct
  source 1..21: mol_type = other RNA; note = Description of Artificial Sequence: Synthetic oligonucleotide
taactccattttagtaggatt

SEQ ID NO: 19686 - RNA, 21 nt, synthetic construct
  source 1..21: mol_type = other RNA; note = Description of Artificial Sequence: Synthetic oligonucleotide
aactccattttagtagggatt

SEQ ID NO: 19687 - RNA, 21 nt, synthetic construct
  source 1..21: mol_type = other RNA; note = Description of Artificial Sequence: Synthetic oligonucleotide
actccattttagtagggaatt

SEQ ID NO: 19688 - RNA, 21 nt, synthetic construct
  source 1..21: mol_type = other RNA; note = Description of Artificial Sequence: Synthetic oligonucleotide
ctccattttagtagggatatt

SEQ ID NO: 19689 - RNA, 21 nt, synthetic construct
  source 1..21: mol_type = other RNA; note = Description of Artificial Sequence: Synthetic oligonucleotide
tccattttagtagggattatt

SEQ ID NO: 19690 - RNA, 21 nt, synthetic construct
  source 1..21: mol_type = other RNA; note = Description of Artificial Sequence: Synthetic oligonucleotide
ccattttagtagggattcatt

SEQ ID NO: 19691 - RNA, 21 nt, synthetic construct
  source 1..21: mol_type = other RNA; note = Description of Artificial Sequence: Synthetic oligonucleotide
cattttagtagggattcaatt

SEQ ID NO: 19692 - RNA, 21 nt, synthetic construct
  source 1..21: mol_type = other RNA; note = Description of Artificial Sequence: Synthetic oligonucleotide
attttagtagggattcacatt

SEQ ID NO: 19693 - RNA, 21 nt, synthetic construct
  source 1..21: mol_type = other RNA; note = Description of Artificial Sequence: Synthetic oligonucleotide
ttttagtagggattcactatt

SEQ ID NO: 19694 - RNA, 21 nt, synthetic construct
  source 1..21: mol_type = other RNA; note = Description of Artificial Sequence: Synthetic oligonucleotide
tttagtagggattcactgatt

SEQ ID NO: 19695 - RNA, 21 nt, synthetic construct
  source 1..21: mol_type = other RNA; note = Description of Artificial Sequence: Synthetic oligonucleotide
ttagtagggattcactgaatt

SEQ ID NO: 19696 - RNA, 21 nt, synthetic construct
  source 1..21: mol_type = other RNA; note = Description of Artificial Sequence: Synthetic oligonucleotide
tagtagggattcactgacatt

SEQ ID NO: 19697 - RNA, 21 nt, synthetic construct
  source 1..21: mol_type = other RNA; note = Description of Artificial Sequence: Synthetic oligonucleotide
agtagggattcactgactatt

SEQ ID NO: 19698 - RNA, 21 nt, synthetic construct
  source 1..21: mol_type = other RNA; note = Description of Artificial Sequence: Synthetic oligonucleotide
gtagggattcactgactaatt

SEQ ID NO: 19699 - RNA, 21 nt, synthetic construct
  source 1..21: mol_type = other RNA; note = Description of Artificial Sequence: Synthetic oligonucleotide
tagggattcactgactagatt

SEQ ID NO: 19700 - RNA, 21 nt, synthetic construct
  source 1..21: mol_type = other RNA; note = Description of Artificial Sequence: Synthetic oligonucleotide
agggattcactgactagaatt

SEQ ID NO: 19701 - RNA, 21 nt, synthetic construct
  source 1..21: mol_type = other RNA; note = Description of Artificial Sequence: Synthetic oligonucleotide
gggattcactgactagatatt

SEQ ID NO: 19702 - RNA, 21 nt, synthetic construct
  source 1..21: mol_type = other RNA; note = Description of Artificial Sequence: Synthetic oligonucleotide
ggattcactgactagattatt

SEQ ID NO: 19703 - RNA, 21 nt, synthetic construct
  source 1..21: mol_type = other RNA; note = Description of Artificial Sequence: Synthetic oligonucleotide
gattcactgactagatttatt

SEQ ID NO: 19704 - RNA, 21 nt, synthetic construct
  source 1..21: mol_type = other RNA; note = Description of Artificial Sequence: Synthetic oligonucleotide
attcactgactagattttatt

SEQ ID NO: 19705 - RNA, 21 nt, synthetic construct
  source 1..21: mol_type = other RNA; note = Description of Artificial Sequence: Synthetic oligonucleotide
ttcactgactagattttaatt

SEQ ID NO: 19706 - RNA, 21 nt, synthetic construct
  source 1..21: mol_type = other RNA; note = Description of Artificial Sequence: Synthetic oligonucleotide
tcactgactagattttacatt

SEQ ID NO: 19707 - RNA, 21 nt, synthetic construct
  source 1..21: mol_type = other RNA; note = Description of Artificial Sequence: Synthetic oligonucleotide
cactgactagattttactatt

SEQ ID NO: 19708 - RNA, 21 nt, synthetic construct
  source 1..21: mol_type = other RNA; note = Description of Artificial Sequence: Synthetic oligonucleotide
actgactagattttactgatt

SEQ ID NO: 19709 - RNA, 21 nt, synthetic construct
  source 1..21: mol_type = other RNA; note = Description of Artificial Sequence: Synthetic oligonucleotide
ctgactagattttactgaatt

SEQ ID NO: 19710 - RNA, 21 nt, synthetic construct
  source 1..21: mol_type = other RNA; note = Description of Artificial Sequence: Synthetic oligonucleotide
tgactagattttactgaaatt

SEQ ID NO: 19711 - RNA, 21 nt, synthetic construct
  source 1..21: mol_type = other RNA; note = Description of Artificial Sequence: Synthetic oligonucleotide
gactagattttactgaacatt

SEQ ID NO: 19712 - RNA, 21 nt, synthetic construct
  source 1..21: mol_type = other RNA; note = Description of Artificial Sequence: Synthetic oligonucleotide
actagattttactgaactatt

SEQ ID NO: 19713 - RNA, 21 nt, synthetic construct
  source 1..21: mol_type = other RNA; note = Description of Artificial Sequence: Synthetic oligonucleotide
ctagattttactgaactaatt

SEQ ID NO: 19714 - RNA, 21 nt, synthetic construct
  source 1..21: mol_type = other RNA; note = Description of Artificial Sequence: Synthetic oligonucleotide
tagattttactgaactatatt

SEQ ID NO: 19715 - RNA, 21 nt, synthetic construct
  source 1..21: mol_type = other RNA; note = Description of Artificial Sequence: Synthetic oligonucleotide
agattttactgaactatgatt

SEQ ID NO: 19716 - RNA, 21 nt, synthetic construct
  source 1..21: mol_type = other RNA; note = Description of Artificial Sequence: Synthetic oligonucleotide
gattttactgaactatgaatt

SEQ ID NO: 19717 - RNA, 21 nt, synthetic construct
  source 1..21: mol_type = other RNA; note = Description of Artificial Sequence: Synthetic oligonucleotide
attttactgaactatgaaatt

SEQ ID NO: 19718 - RNA, 21 nt, synthetic construct
  source 1..21: mol_type = other RNA; note = Description of Artificial Sequence: Synthetic oligonucleotide
ttttactgaactatgaaaatt

SEQ ID NO: 19719 - RNA, 21 nt, synthetic construct
  source 1..21: mol_type = other RNA; note = Description of Artificial Sequence: Synthetic oligonucleotide
tttactgaactatgaaaaatt

SEQ ID NO: 19720 - RNA, 21 nt, synthetic construct
  source 1..21: mol_type = other RNA; note = Description of Artificial Sequence: Synthetic oligonucleotide
ttactgaactatgaaaatatt

SEQ ID NO: 19721 - RNA, 21 nt, synthetic construct
  source 1..21: mol_type = other RNA; note = Description of Artificial Sequence: Synthetic oligonucleotide
tactgaactatgaaaataatt

SEQ ID NO: 19722 - RNA, 21 nt, synthetic construct
  source 1..21: mol_type = other RNA; note = Description of Artificial Sequence: Synthetic oligonucleotide
actgaactatgaaaataaatt

SEQ ID NO: 19723 - RNA, 21 nt, synthetic construct
  source 1..21: mol_type = other RNA; note = Description of Artificial Sequence: Synthetic oligonucleotide
ctgaactatgaaaataaaatt

SEQ ID NO: 19724 - RNA, 21 nt, synthetic construct
  source 1..21: mol_type = other RNA; note = Description of Artificial Sequence: Synthetic oligonucleotide
tgaactatgaaaataaatatt

SEQ ID NO: 19725 - RNA, 21 nt, synthetic construct
  source 1..21: mol_type = other RNA; note = Description of Artificial Sequence: Synthetic oligonucleotide
gaactatgaaaataaataatt

SEQ ID NO: 19726 - RNA, 21 nt, synthetic construct
  source 1..21: mol_type = other RNA; note = Description of Artificial Sequence: Synthetic oligonucleotide
aactatgaaaataaatacatt

SEQ ID NO: 19727 - RNA, 21 nt, synthetic construct
  source 1..21: mol_type = other RNA; note = Description of Artificial Sequence: Synthetic oligonucleotide
actatgaaaataaatacaatt

SEQ ID NO: 19728 - RNA, 21 nt, synthetic construct
  source 1..21: mol_type = other RNA; note = Description of Artificial Sequence: Synthetic oligonucleotide
ctatgaaaataaatacacatt

SEQ ID NO: 19729 - RNA, 21 nt, synthetic construct
  source 1..21: mol_type = other RNA; note = Description of Artificial Sequence: Synthetic oligonucleotide
tatgaaaataaatacacaatt

SEQ ID NO: 19730 - RNA, 21 nt, synthetic construct
  source 1..21: mol_type = other RNA; note = Description of Artificial Sequence: Synthetic oligonucleotide
atgaaaataaatacacatatt

SEQ ID NO: 19731 - RNA, 21 nt, synthetic construct
  source 1..21: mol_type = other RNA; note = Description of Artificial Sequence: Synthetic oligonucleotide
tgaaaataaatacacataatt

SEQ ID NO: 19732 - RNA, 21 nt, synthetic construct
  source 1..21: mol_type = other RNA; note = Description of Artificial Sequence: Synthetic oligonucleotide
gaaaataaatacacataaatt

SEQ ID NO: 19733 - RNA, 21 nt, synthetic construct
  source 1..21: mol_type = other RNA; note = Description of Artificial Sequence: Synthetic oligonucleotide
aaaataaatacacataatatt

SEQ ID NO: 19734 - RNA, 21 nt, synthetic construct
  source 1..21: mol_type = other RNA; note = Description of Artificial Sequence: Synthetic oligonucleotide
aaataaatacacataattatt

SEQ ID NO: 19735 - RNA, 21 nt, synthetic construct
  source 1..21: mol_type = other RNA; note = Description of Artificial Sequence: Synthetic oligonucleotide
aataaatacacataatttatt

SEQ ID NO: 19736 - RNA, 21 nt, synthetic construct
  source 1..21: mol_type = other RNA; note = Description of Artificial Sequence: Synthetic oligonucleotide
ataaatacacataattttatt

SEQ ID NO: 19737 - RNA, 21 nt, synthetic construct
  source 1..21: mol_type = other RNA; note = Description of Artificial Sequence: Synthetic oligonucleotide
taaatacacataatttttatt

SEQ ID NO: 19738 - RNA, 21 nt, synthetic construct
  source 1..21: mol_type = other RNA; note = Description of Artificial Sequence: Synthetic oligonucleotide
aaatacacataatttttcatt

SEQ ID NO: 19739 - RNA, 21 nt, synthetic construct
  source 1..21: mol_type = other RNA; note = Description of Artificial Sequence: Synthetic oligonucleotide
aatacacataatttttcaatt

SEQ ID NO: 19740 - RNA, 21 nt, synthetic construct
  source 1..21: mol_type = other RNA; note = Description of Artificial Sequence: Synthetic oligonucleotide
atacacataatttttcacatt

SEQ ID NO: 19741 - RNA, 21 nt, synthetic construct
  source 1..21: mol_type = other RNA; note = Description of Artificial Sequence: Synthetic oligonucleotide
tacacataatttttcacaatt

SEQ ID NO: 19742 - RNA, 21 nt, synthetic construct
  source 1..21: mol_type = other RNA; note = Description of Artificial Sequence: Synthetic oligonucleotide
acacataatttttcacaaatt

SEQ ID NO: 19743 - RNA, 21 nt, synthetic construct
  source 1..21: mol_type = other RNA; note = Description of Artificial Sequence: Synthetic oligonucleotide
cacataatttttcacaaaatt

SEQ ID NO: 19744 - RNA, 21 nt, synthetic construct
  source 1..21: mol_type = other RNA; note = Description of Artificial Sequence: Synthetic oligonucleotide
acataatttttcacaaaaatt

SEQ ID NO: 19745 - RNA, 21 nt, synthetic construct
  source 1..21: mol_type = other RNA; note = Description of Artificial Sequence: Synthetic oligonucleotide
cataatttttcacaaaatatt

SEQ ID NO: 19746 - RNA, 21 nt, synthetic construct
  source 1..21: mol_type = other RNA; note = Description of Artificial Sequence: Synthetic oligonucleotide
ataatttttcacaaaattatt

SEQ ID NO: 19747 - RNA, 21 nt, synthetic construct
  source 1..21: mol_type = other RNA; note = Description of Artificial Sequence: Synthetic oligonucleotide
taatttttcacaaaatttatt

SEQ ID NO: 19748 - RNA, 21 nt, synthetic construct
  source 1..21: mol_type = other RNA; note = Description of Artificial Sequence: Synthetic oligonucleotide
aatttttcacaaaattttatt

SEQ ID NO: 19749 - RNA, 21 nt, synthetic construct
  source 1..21: mol_type = other RNA; note = Description of Artificial Sequence: Synthetic oligonucleotide
atttttcacaaaattttgatt

SEQ ID NO: 19750 - RNA, 21 nt, synthetic construct
  source 1..21: mol_type = other RNA; note = Description of Artificial Sequence: Synthetic oligonucleotide
tttttcacaaaattttggatt

SEQ ID NO: 19751 - RNA, 21 nt, synthetic construct
  source 1..21: mol_type = other RNA; note = Description of Artificial Sequence: Synthetic oligonucleotide
ttttcacaaaattttgggatt

SEQ ID NO: 19752 - RNA, 21 nt, synthetic construct
  source 1..21: mol_type = other RNA; note = Description of Artificial Sequence: Synthetic oligonucleotide
tttcacaaaattttgggcatt

SEQ ID NO: 19753 - RNA, 21 nt, synthetic construct
  source 1..21: mol_type = other RNA; note = Description of Artificial Sequence: Synthetic oligonucleotide
ttcacaaaattttgggccatt

SEQ ID NO: 19754 - RNA, 21 nt, synthetic construct
  source 1..21: mol_type = other RNA; note = Description of Artificial Sequence: Synthetic oligonucleotide
tcacaaaattttgggcccatt

SEQ ID NO: 19755 - RNA, 21 nt, synthetic construct
  source 1..21: mol_type = other RNA; note = Description of Artificial Sequence: Synthetic oligonucleotide
cacaaaattttgggcccaatt

SEQ ID NO: 19756 - RNA, 21 nt, synthetic construct
  source 1..21: mol_type = other RNA; note = Description of Artificial Sequence: Synthetic oligonucleotide
acaaaattttgggcccaaatt

SEQ ID NO: 19757 - RNA, 21 nt, synthetic construct
  source 1..21: mol_type = other RNA; note = Description of Artificial Sequence: Synthetic oligonucleotide
caaaattttgggcccaatatt

SEQ ID NO: 19758 - RNA, 21 nt, synthetic construct
  source 1..21: mol_type = other RNA; note = Description of Artificial Sequence: Synthetic oligonucleotide
aaaattttgggcccaattatt

SEQ ID NO: 19759 - RNA, 21 nt, synthetic construct
  source 1..21: mol_type = other RNA; note = Description of Artificial Sequence: Synthetic oligonucleotide
aaattttgggcccaattcatt

SEQ ID NO: 19760 - RNA, 21 nt, synthetic construct
  source 1..21: mol_type = other RNA; note = Description of Artificial Sequence: Synthetic oligonucleotide
aattttgggcccaattccatt

SEQ ID NO: 19761 - RNA, 21 nt, synthetic construct
  source 1..21: mol_type = other RNA; note = Description of Artificial Sequence: Synthetic oligonucleotide
attttgggcccaattcccatt

SEQ ID NO: 19762 - RNA, 21 nt, synthetic construct
  source 1..21: mol_type = other RNA; note = Description of Artificial Sequence: Synthetic oligonucleotide
ttttgggcccaattccccatt

SEQ ID NO: 19763 - RNA, 21 nt, synthetic construct
  source 1..21: mol_type = other RNA; note = Description of Artificial Sequence: Synthetic oligonucleotide
tttgggcccaattcccctatt

SEQ ID NO: 19764 - RNA, 21 nt, synthetic construct
  source 1..21: mol_type = other RNA; note = Description of Artificial Sequence: Synthetic oligonucleotide
ttgggcccaattcccctaatt

SEQ ID NO: 19765 - RNA, 21 nt, synthetic construct
  source 1..21: mol_type = other RNA; note = Description of Artificial Sequence: Synthetic oligonucleotide
tgggcccaattcccctaaatt

SEQ ID NO: 19766 - RNA, 21 nt, synthetic construct
  source 1..21: mol_type = other RNA; note = Description of Artificial Sequence: Synthetic oligonucleotide
gggcccaattcccctaaaatt

SEQ ID NO: 19767 - RNA, 21 nt, synthetic construct
  source 1..21: mol_type = other RNA; note = Description of Artificial Sequence: Synthetic oligonucleotide
ggcccaattcccctaaaaatt

SEQ ID NO: 19768 - RNA, 21 nt, synthetic construct
  source 1..21: mol_type = other RNA; note = Description of Artificial Sequence: Synthetic oligonucleotide
gcccaattcccctaaaagatt

SEQ ID NO: 19769 - RNA, 21 nt, synthetic construct
  source 1..21: mol_type = other RNA; note = Description of Artificial Sequence: Synthetic oligonucleotide
cccaattcccctaaaagaatt

SEQ ID NO: 19770 - RNA, 21 nt, synthetic construct
  source 1..21: mol_type = other RNA; note = Description of Artificial Sequence: Synthetic oligonucleotide
ccaattcccctaaaagaaatt

SEQ ID NO: 19771 - RNA, 21 nt, synthetic construct
  source 1..21: mol_type = other RNA; note = Description of Artificial Sequence: Synthetic oligonucleotide
caattcccctaaaagaatatt

SEQ ID NO: 19772 - RNA, 21 nt, synthetic construct
  source 1..21: mol_type = other RNA; note = Description of Artificial Sequence: Synthetic oligonucleotide
aattcccctaaaagaattatt

SEQ ID NO: 19773 - RNA, 21 nt, synthetic construct
  source 1..21: mol_type = other RNA; note = Description of Artificial Sequence: Synthetic oligonucleotide
attcccctaaaagaattgatt

SEQ ID NO: 19774 - RNA, 21 nt, synthetic construct
  source 1..21: mol_type = other RNA; note = Description of Artificial Sequence: Synthetic oligonucleotide
ttcccctaaaagaattgaatt

SEQ ID NO: 19775 - RNA, 21 nt, synthetic construct
  source 1..21: mol_type = other RNA; note = Description of Artificial Sequence: Synthetic oligonucleotide
tcccctaaaagaattgagatt

SEQ ID NO: 19776 - RNA, 21 nt, synthetic construct
  source 1..21: mol_type = other RNA; note = Description of Artificial Sequence: Synthetic oligonucleotide
cccctaaaagaattgaggatt

SEQ ID NO: 19777 - RNA, 21 nt, synthetic construct
  source 1..21: mol_type = other RNA; note = Description of Artificial Sequence: Synthetic oligonucleotide
ccctaaaagaattgaggaatt

SEQ ID NO: 19778 - RNA, 21 nt, synthetic construct
  source 1..21: mol_type = other RNA; note = Description of Artificial Sequence: Synthetic oligonucleotide
cctaaaagaattgaggatatt

SEQ ID NO: 19779 - RNA, 21 nt, synthetic construct
  source 1..21: mol_type = other RNA; note = Description of Artificial Sequence: Synthetic oligonucleotide
ctaaaagaattgaggattatt

SEQ ID NO: 19780 - RNA, 21 nt, synthetic construct
  source 1..21: mol_type = other RNA; note = Description of Artificial Sequence: Synthetic oligonucleotide
taaaagaattgaggattaatt

SEQ ID NO: 19781 - RNA, 21 nt, synthetic construct
  source 1..21: mol_type = other RNA; note = Description of Artificial Sequence: Synthetic oligonucleotide
aaaagaattgaggattagatt

SEQ ID NO: 19782 - RNA, 21 nt, synthetic construct
  source 1..21: mol_type = other RNA; note = Description of Artificial Sequence: Synthetic oligonucleotide
aaagaattgaggattaggatt

SEQ ID NO: 19783 - RNA, 21 nt, synthetic construct
  source 1..21: mol_type = other RNA; note = Description of Artificial Sequence: Synthetic oligonucleotide
aagaattgaggattagggatt

SEQ ID NO: 19784 - RNA, 21 nt, synthetic construct
  source 1..21: mol_type = other RNA; note = Description of Artificial Sequence: Synthetic oligonucleotide
agaattgaggattagggaatt

SEQ ID NO: 19785 - RNA, 21 nt, synthetic construct
  source 1..21: mol_type = other RNA; note = Description of Artificial Sequence: Synthetic oligonucleotide
gaattgaggattagggagatt

SEQ ID NO: 19786 - RNA, 21 nt, synthetic construct
  source 1..21: mol_type = other RNA; note = Description of Artificial Sequence: Synthetic oligonucleotide
aattgaggattagggagaatt

SEQ ID NO: 19787 - RNA, 21 nt, synthetic construct
  source 1..21: mol_type = other RNA; note = Description of Artificial Sequence: Synthetic oligonucleotide
attgaggattagggagaaatt

SEQ ID NO: 19788 - RNA, 21 nt, synthetic construct
  source 1..21: mol_type = other RNA; note = Description of Artificial Sequence: Synthetic oligonucleotide
ttgaggattagggagaaaatt

SEQ ID NO: 19789 - RNA, 21 nt, synthetic construct
  source 1..21: mol_type = other RNA; note = Description of Artificial Sequence: Synthetic oligonucleotide
tgaggattagggagaaagatt

SEQ ID NO: 19790 - RNA, 21 nt, synthetic construct
  source 1..21: mol_type = other RNA; note = Description of Artificial Sequence: Synthetic oligonucleotide
gaggattagggagaaaggatt

SEQ ID NO: 19791 - RNA, 21 nt, synthetic construct
  source 1..21: mol_type = other RNA; note = Description of Artificial Sequence: Synthetic oligonucleotide
aggattagggagaaaggaatt

SEQ ID NO: 19792 - RNA, 21 nt, synthetic construct
  source 1..21: mol_type = other RNA; note = Description of Artificial Sequence: Synthetic oligonucleotide
ggattagggagaaaggagatt

SEQ ID NO: 19793 - RNA, 21 nt, synthetic construct
  source 1..21: mol_type = other RNA; note = Description of Artificial Sequence: Synthetic oligonucleotide
gattagggagaaaggagaatt

SEQ ID NO: 19794 - RNA, 21 nt, synthetic construct
  source 1..21: mol_type = other RNA; note = Description of Artificial Sequence: Synthetic oligonucleotide
attagggagaaaggagacatt

SEQ ID NO: 19795 - RNA, 21 nt, synthetic construct
  source 1..21: mol_type = other RNA; note = Description of Artificial Sequence: Synthetic oligonucleotide
ttagggagaaaggagacaatt

SEQ ID NO: 19796 - RNA, 21 nt, synthetic construct
  source 1..21: mol_type = other RNA; note = Description of Artificial Sequence: Synthetic oligonucleotide
tagggagaaaggagacaaatt

SEQ ID NO: 19797 - RNA, 21 nt, synthetic construct
  source 1..21: mol_type = other RNA; note = Description of Artificial Sequence: Synthetic oligonucleotide
agggagaaaggagacaacatt

SEQ ID NO: 19798 - RNA, 21 nt, synthetic construct
  source 1..21: mol_type = other RNA; note = Description of Artificial Sequence: Synthetic oligonucleotide
gggagaaaggagacaactatt

SEQ ID NO: 19799 - RNA, 21 nt, synthetic construct
  source 1..21: mol_type = other RNA; note = Description of Artificial Sequence: Synthetic oligonucleotide
ggagaaaggagacaactcatt

SEQ ID NO: 19800 - RNA, 21 nt, synthetic construct
  source 1..21: mol_type = other RNA; note = Description of Artificial Sequence: Synthetic oligonucleotide
gagaaaggagacaactcaatt

SEQ ID NO: 19801 - RNA, 21 nt, synthetic construct
  source 1..21: mol_type = other RNA; note = Description of Artificial Sequence: Synthetic oligonucleotide
agaaaggagacaactcaaatt

SEQ ID NO: 19802 - RNA, 21 nt, synthetic construct
  source 1..21: mol_type = other RNA; note = Description of Artificial Sequence: Synthetic oligonucleotide
gaaaggagacaactcaaaatt

SEQ ID NO: 19803 - RNA, 21 nt, synthetic construct
  source 1..21: mol_type = other RNA; note = Description of Artificial Sequence: Synthetic oligonucleotide
aaaggagacaactcaaagatt

SEQ ID NO: 19804 - RNA, 21 nt, synthetic construct
  source 1..21: mol_type = other RNA; note = Description of Artificial Sequence: Synthetic oligonucleotide
aaggagacaactcaaagtatt

SEQ ID NO: 19805 - RNA, 21 nt, synthetic construct
  source 1..21: mol_type = other RNA; note = Description of Artificial Sequence: Synthetic oligonucleotide
aggagacaactcaaagtcatt

SEQ ID NO: 19806 - RNA, 21 nt, synthetic construct
  source 1..21: mol_type = other RNA; note = Description of Artificial Sequence: Synthetic oligonucleotide
ggagacaactcaaagtcaatt

SEQ ID NO: 19807 - RNA, 21 nt, synthetic construct
  source 1..21: mol_type = other RNA; note = Description of Artificial Sequence: Synthetic oligonucleotide
gagacaactcaaagtcatatt

SEQ ID NO: 19808 - RNA, 21 nt, synthetic construct
  source 1..21: mol_type = other RNA; note = Description of Artificial Sequence: Synthetic oligonucleotide
agacaactcaaagtcatcatt

SEQ ID NO: 19809 - RNA, 21 nt, synthetic construct
  source 1..21: mol_type = other RNA; note = Description of Artificial Sequence: Synthetic oligonucleotide
gacaactcaaagtcatccatt

SEQ ID NO: 19810 - RNA, 21 nt, synthetic construct
  source 1..21: mol_type = other RNA; note = Description of Artificial Sequence: Synthetic oligonucleotide
acaactcaaagtcatcccatt

SEQ ID NO: 19811 - RNA, 21 nt, synthetic construct
  source 1..21: mol_type = other RNA; note = Description of Artificial Sequence: Synthetic oligonucleotide
caactcaaagtcatcccaatt

SEQ ID NO: 19812 - RNA, 21 nt, synthetic construct
  source 1..21: mol_type = other RNA; note = Description of Artificial Sequence: Synthetic oligonucleotide
aactcaaagtcatcccatatt

SEQ ID NO: 19813 - RNA, 21 nt, synthetic construct
  source 1..21: mol_type = other RNA; note = Description of Artificial Sequence: Synthetic oligonucleotide
actcaaagtcatcccattatt

SEQ ID NO: 19814 - RNA, 21 nt, synthetic construct
  source 1..21: mol_type = other RNA; note = Description of Artificial Sequence: Synthetic oligonucleotide
ctcaaagtcatcccattaatt

SEQ ID NO: 19815 - RNA, 21 nt, synthetic construct
  source 1..21: mol_type = other RNA; note = Description of Artificial Sequence: Synthetic oligonucleotide
tcaaagtcatcccattaaatt

SEQ ID NO: 19816 - RNA, 21 nt, synthetic construct
  source 1..21: mol_type = other RNA; note = Description of Artificial Sequence: Synthetic oligonucleotide
caaagtcatcccattaagatt

SEQ ID NO: 19817 - RNA, 21 nt, synthetic construct
  source 1..21: mol_type = other RNA; note = Description of Artificial Sequence: Synthetic oligonucleotide
aaagtcatcccattaagtatt

SEQ ID NO: 19818 - RNA, 21 nt, synthetic construct
  source 1..21: mol_type = other RNA; note = Description of Artificial Sequence: Synthetic oligonucleotide
aagtcatcccattaagtgatt

SEQ ID NO: 19819 - RNA, 21 nt, synthetic construct
  source 1..21: mol_type = other RNA; note = Description of Artificial Sequence: Synthetic oligonucleotide
agtcatcccattaagtgcatt

SEQ ID NO: 19820 - RNA, 21 nt, synthetic construct
  source 1..21: mol_type = other RNA; note = Description of Artificial Sequence: Synthetic oligonucleotide
gtcatcccattaagtgcaatt

SEQ ID NO: 19821 - RNA, 21 nt, synthetic construct
  source 1..21: mol_type = other RNA; note = Description of Artificial Sequence: Synthetic oligonucleotide
tcatcccattaagtgcagatt

SEQ ID NO: 19822 - RNA, 21 nt, synthetic construct
  source 1..21: mol_type = other RNA; note = Description of Artificial Sequence: Synthetic oligonucleotide
catcccattaagtgcagtatt

SEQ ID NO: 19823 - RNA, 21 nt, synthetic construct
  source 1..21: mol_type = other RNA; note = Description of Artificial Sequence: Synthetic oligonucleotide
atcccattaagtgcagttatt

SEQ ID NO: 19824 - RNA, 21 nt, synthetic construct
  source 1..21: mol_type = other RNA; note = Description of Artificial Sequence: Synthetic oligonucleotide
tcccattaagtgcagtttatt

SEQ ID NO: 19825 - RNA, 21 nt, synthetic construct
  source 1..21: mol_type = other RNA; note = Description of Artificial Sequence: Synthetic oligonucleotide
cccattaagtgcagtttcatt

SEQ ID NO: 19826 - RNA, 21 nt, synthetic construct
  source 1..21: mol_type = other RNA; note = Description of Artificial Sequence: Synthetic oligonucleotide
ccattaagtgcagtttctatt

SEQ ID NO: 19827 - RNA, 21 nt, synthetic construct
  source 1..21: mol_type = other RNA; note = Description of Artificial Sequence: Synthetic oligonucleotide
cattaagtgcagtttcttatt

SEQ ID NO: 19828 - RNA, 21 nt, synthetic construct
  source 1..21: mol_type = other RNA; note = Description of Artificial Sequence: Synthetic oligonucleotide
attaagtgcagtttctttatt

SEQ ID NO: 19829 - RNA, 21 nt, synthetic construct
  source 1..21: mol_type = other RNA; note = Description of Artificial Sequence: Synthetic oligonucleotide
ttaagtgcagtttctttgatt

SEQ ID NO: 19830 - RNA, 21 nt, synthetic construct
  source 1..21: mol_type = other RNA; note = Description of Artificial Sequence: Synthetic oligonucleotide
taagtgcagtttctttgaatt

SEQ ID NO: 19831 - RNA, 21 nt, synthetic construct
  source 1..21: mol_type = other RNA; note = Description of Artificial Sequence: Synthetic oligonucleotide
aagtgcagtttctttgaaatt

SEQ ID NO: 19832 - RNA, 21 nt, synthetic construct
  source 1..21: mol_type = other RNA; note = Description of Artificial Sequence: Synthetic oligonucleotide
agtgcagtttctttgaatatt

SEQ ID NO: 19833 - RNA, 21 nt, synthetic construct
  source 1..21: mol_type = other RNA; note = Description of Artificial Sequence: Synthetic oligonucleotide
gtgcagtttctttgaatcatt

SEQ ID NO: 19834 - RNA, 21 nt, synthetic construct
  source 1..21: mol_type = other RNA; note = Description of Artificial Sequence: Synthetic oligonucleotide
tgcagtttctttgaatctatt

SEQ ID NO: 19835 - RNA, 21 nt, synthetic construct
  source 1..21: mol_type = other RNA; note = Description of Artificial Sequence: Synthetic oligonucleotide
gcagtttctttgaatcttatt

SEQ ID NO: 19836 - RNA, 21 nt, synthetic construct
  source 1..21: mol_type = other RNA; note = Description of Artificial Sequence: Synthetic oligonucleotide
cagtttctttgaatcttcatt

SEQ ID NO: 19837 - RNA, 21 nt, synthetic construct
  source 1..21: mol_type = other RNA; note = Description of Artificial Sequence: Synthetic oligonucleotide
agtttctttgaatcttctatt

SEQ ID NO: 19838 - RNA, 21 nt, synthetic construct
  source 1..21: mol_type = other RNA; note = Description of Artificial Sequence: Synthetic oligonucleotide
gtttctttgaatcttctgatt

SEQ ID NO: 19839 - RNA, 21 nt, synthetic construct
  source 1..21: mol_type = other RNA; note = Description of Artificial Sequence: Synthetic oligonucleotide
tttctttgaatcttctgcatt

SEQ ID NO: 19840 - RNA, 21 nt, synthetic construct
  source 1..21: mol_type = other RNA; note = Description of Artificial Sequence: Synthetic oligonucleotide
ttctttgaatcttctgctatt

SEQ ID NO: 19841 - RNA, 21 nt, synthetic construct
  source 1..21: mol_type = other RNA; note = Description of Artificial Sequence: Synthetic oligonucleotide
tctttgaatcttctgcttatt

SEQ ID NO: 19842 - RNA, 21 nt, synthetic construct
  source 1..21: mol_type = other RNA; note = Description of Artificial Sequence: Synthetic oligonucleotide
ctttgaatcttctgctttatt

SEQ ID NO: 19843 - RNA, 21 nt, synthetic construct
  source 1..21: mol_type = other RNA; note = Description of Artificial Sequence: Synthetic oligonucleotide
tttgaatcttctgctttaatt

SEQ ID NO: 19844 - RNA, 21 nt, synthetic construct
  source 1..21: mol_type = other RNA; note = Description of Artificial Sequence: Synthetic oligonucleotide
ttgaatcttctgctttatatt

SEQ ID NO: 19845 - RNA, 21 nt, synthetic construct
  source 1..21: mol_type = other RNA; note = Description of Artificial Sequence: Synthetic oligonucleotide
tgaatcttctgctttatcatt

SEQ ID NO: 19846 - RNA, 21 nt, synthetic construct
  source 1..21: mol_type = other RNA; note = Description of Artificial Sequence: Synthetic oligonucleotide
gaatcttctgctttatctatt

SEQ ID NO: 19847 - RNA, 21 nt, synthetic construct
  source 1..21: mol_type = other RNA; note = Description of Artificial Sequence: Synthetic oligonucleotide
aatcttctgctttatcttatt

SEQ ID NO: 19848 - RNA, 21 nt, synthetic construct
  source 1..21: mol_type = other RNA; note = Description of Artificial Sequence: Synthetic oligonucleotide
atcttctgctttatctttatt

SEQ ID NO: 19849 - RNA, 21 nt, synthetic construct
  source 1..21: mol_type = other RNA; note = Description of Artificial Sequence: Synthetic oligonucleotide
tcttctgctttatctttaatt

SEQ ID NO: 19850 - RNA, 21 nt, synthetic construct
  source 1..21: mol_type = other RNA; note = Description of Artificial Sequence: Synthetic oligonucleotide
cttctgctttatctttaaatt

SEQ ID NO: 19851 - RNA, 21 nt, synthetic construct
  source 1..21: mol_type = other RNA; note = Description of Artificial Sequence: Synthetic oligonucleotide
ttctgctttatctttaaaatt

SEQ ID NO: 19852 - RNA, 21 nt, synthetic construct
  source 1..21: mol_type = other RNA; note = Description of Artificial Sequence: Synthetic oligonucleotide
tctgctttatctttaaaaatt

SEQ ID NO: 19853 - RNA, 21 nt, synthetic construct
  source 1..21: mol_type = other RNA; note = Description of Artificial Sequence: Synthetic oligonucleotide
ctgctttatctttaaaaaatt

SEQ ID NO: 19854 - RNA, 21 nt, synthetic construct
  source 1..21: mol_type = other RNA; note = Description of Artificial Sequence: Synthetic oligonucleotide
tgctttatctttaaaaatatt

SEQ ID NO: 19855 - RNA, 21 nt, synthetic construct
  source 1..21: mol_type = other RNA; note = Description of Artificial Sequence: Synthetic oligonucleotide
gctttatctttaaaaattatt

SEQ ID NO: 19856 - RNA, 21 nt, synthetic construct
  source 1..21: mol_type = other RNA; note = Description of Artificial Sequence: Synthetic oligonucleotide
ctttatctttaaaaatttatt

SEQ ID NO: 19857 - RNA, 21 nt, synthetic construct
  source 1..21: mol_type = other RNA; note = Description of Artificial Sequence: Synthetic oligonucleotide
tttatctttaaaaatttgatt

SEQ ID NO: 19858 - RNA, 21 nt, synthetic construct
  source 1..21: mol_type = other RNA; note = Description of Artificial Sequence: Synthetic oligonucleotide
ttatctttaaaaatttgtatt

SEQ ID NO: 19859 - RNA, 21 nt, synthetic construct
  source 1..21: mol_type = other RNA; note = Description of Artificial Sequence: Synthetic oligonucleotide
tatctttaaaaatttgtaatt

SEQ ID NO: 19860 - RNA, 21 nt, synthetic construct
  source 1..21: mol_type = other RNA; note = Description of Artificial Sequence: Synthetic oligonucleotide
atctttaaaaatttgtatatt

SEQ ID NO: 19861 - RNA, 21 nt, synthetic construct
  source 1..21: mol_type = other RNA; note = Description of Artificial Sequence: Synthetic oligonucleotide
tctttaaaaatttgtataatt

SEQ ID NO: 19862 - RNA, 21 nt, synthetic construct
  source 1..21: mol_type = other RNA; note = Description of Artificial Sequence: Synthetic oligonucleotide
ctttaaaaatttgtataaatt

SEQ ID NO: 19863 - RNA, 21 nt, synthetic construct
  source 1..21: mol_type = other RNA; note = Description of Artificial Sequence: Synthetic oligonucleotide
tttaaaaatttgtataatatt

SEQ ID NO: 19864 - RNA, 21 nt, synthetic construct
  source 1..21: mol_type = other RNA; note = Description of Artificial Sequence: Synthetic oligonucleotide
ttaaaaatttgtataattatt

SEQ ID NO: 19865 - RNA, 21 nt, synthetic construct
  source 1..21: mol_type = other RNA; note = Description of Artificial Sequence: Synthetic oligonucleotide
taaaaatttgtataatttatt

SEQ ID NO: 19866 - RNA, 21 nt, synthetic construct
  source 1..21: mol_type = other RNA; note = Description of Artificial Sequence: Synthetic oligonucleotide
aaaaatttgtataatttaatt

SEQ ID NO: 19867 - RNA, 21 nt, synthetic construct
  source 1..21: mol_type = other RNA; note = Description of Artificial Sequence: Synthetic oligonucleotide
aaaatttgtataatttatatt

SEQ ID NO: 19868 - RNA, 21 nt, synthetic construct
  source 1..21: mol_type = other RNA; note = Description of Artificial Sequence: Synthetic oligonucleotide
aaatttgtataatttataatt

SEQ ID NO: 19869 - RNA, 21 nt, synthetic construct
  source 1..21: mol_type = other RNA; note = Description of Artificial Sequence: Synthetic oligonucleotide
aatttgtataatttatatatt

SEQ ID NO: 19870 - RNA, 21 nt, synthetic construct
  source 1..21: mol_type = other RNA; note = Description of Artificial Sequence: Synthetic oligonucleotide
atttgtataatttatataatt

SEQ ID NO: 19871 - RNA, 21 nt, synthetic construct
  source 1..21: mol_type = other RNA; note = Description of Artificial Sequence: Synthetic oligonucleotide
tttgtataatttatatatatt

SEQ ID NO: 19872 - RNA, 21 nt, synthetic construct
  source 1..21: mol_type = other RNA; note = Description of Artificial Sequence: Synthetic oligonucleotide
ttgtataatttatatattatt

SEQ ID NO: 19873 - RNA, 21 nt, synthetic construct
  source 1..21: mol_type = other RNA; note = Description of Artificial Sequence: Synthetic oligonucleotide
tgtataatttatatatttatt

SEQ ID NO: 19874 - RNA, 21 nt, synthetic construct
  source 1..21: mol_type = other RNA; note = Description of Artificial Sequence: Synthetic oligonucleotide
gtataatttatatattttatt

SEQ ID NO: 19875 - RNA, 21 nt, synthetic construct
  source 1..21: mol_type = other RNA; note = Description of Artificial Sequence: Synthetic oligonucleotide
tataatttatatattttaatt

SEQ ID NO: 19876 - RNA, 21 nt, synthetic construct
  source 1..21: mol_type = other RNA; note = Description of Artificial Sequence: Synthetic oligonucleotide
ataatttatatattttatatt

SEQ ID NO: 19877 - RNA, 21 nt, synthetic construct
  source 1..21: mol_type = other RNA; note = Description of Artificial Sequence: Synthetic oligonucleotide
taatttatatattttattatt

SEQ ID NO: 19878 - RNA, 21 nt, synthetic construct
  source 1..21: mol_type = other RNA; note = Description of Artificial Sequence: Synthetic oligonucleotide
aatttatatattttattcatt

SEQ ID NO: 19879 - RNA, 21 nt, synthetic construct
  source 1..21: mol_type = other RNA; note = Description of Artificial Sequence: Synthetic oligonucleotide
atttatatattttattctatt

SEQ ID NO: 19880 - RNA, 21 nt, synthetic construct
  source 1..21: mol_type = other RNA; note = Description of Artificial Sequence: Synthetic oligonucleotide
tttatatattttattctaatt

SEQ ID NO: 19881 - RNA, 21 nt, synthetic construct
  source 1..21: mol_type = other RNA; note = Description of Artificial Sequence: Synthetic oligonucleotide
ttatatattttattctatatt

SEQ ID NO: 19882 - RNA, 21 nt, synthetic construct
  source 1..21: mol_type = other RNA; note = Description of Artificial Sequence: Synthetic oligonucleotide
tatatattttattctatgatt

SEQ ID NO: 19883 - RNA, 21 nt, synthetic construct
  source 1..21: mol_type = other RNA; note = Description of Artificial Sequence: Synthetic oligonucleotide
atatattttattctatgtatt

SEQ ID NO: 19884 - RNA, 21 nt, synthetic construct
  source 1..21: mol_type = other RNA; note = Description of Artificial Sequence: Synthetic oligonucleotide
tatattttattctatgtgatt

SEQ ID NO: 19885 - RNA, 21 nt, synthetic construct
  source 1..21: mol_type = other RNA; note = Description of Artificial Sequence: Synthetic oligonucleotide
atattttattctatgtgtatt

SEQ ID NO: 19886 - RNA, 21 nt, synthetic construct
  source 1..21: mol_type = other RNA; note = Description of Artificial Sequence: Synthetic oligonucleotide
tattttattctatgtgttatt

SEQ ID NO: 19887 - RNA, 21 nt, synthetic construct
  source 1..21: mol_type = other RNA; note = Description of Artificial Sequence: Synthetic oligonucleotide
attttattctatgtgttcatt

SEQ ID NO: 19888 - RNA, 21 nt, synthetic construct
  source 1..21: mol_type = other RNA; note = Description of Artificial Sequence: Synthetic oligonucleotide
ttttattctatgtgttccatt

SEQ ID NO: 19889 - RNA, 21 nt, synthetic construct
  source 1..21: mol_type = other RNA; note = Description of Artificial Sequence: Synthetic oligonucleotide
tttattctatgtgttccaatt

SEQ ID NO: 19890 - RNA, 21 nt, synthetic construct
  source 1..21: mol_type = other RNA; note = Description of Artificial Sequence: Synthetic oligonucleotide
ttattctatgtgttccatatt

SEQ ID NO: 19891 - RNA, 21 nt, synthetic construct
  source 1..21: mol_type = other RNA; note = Description of Artificial Sequence: Synthetic oligonucleotide
tattctatgtgttccataatt

SEQ ID NO: 19892 - RNA, 21 nt, synthetic construct
  source 1..21: mol_type = other RNA; note = Description of Artificial Sequence: Synthetic oligonucleotide
attctatgtgttccatagatt

SEQ ID NO: 19893 - RNA, 21 nt, synthetic construct
  source 1..21: mol_type = other RNA; note = Description of Artificial Sequence: Synthetic oligonucleotide
ttctatgtgttccatagaatt

SEQ ID NO: 19894 - RNA, 21 nt, synthetic construct
  source 1..21: mol_type = other RNA; note = Description of Artificial Sequence: Synthetic oligonucleotide
tctatgtgttccatagatatt

SEQ ID NO: 19895 - RNA, 21 nt, synthetic construct
  source 1..21: mol_type = other RNA; note = Description of Artificial Sequence: Synthetic oligonucleotide
ctatgtgttccatagataatt

SEQ ID NO: 19896 - RNA, 21 nt, synthetic construct
  source 1..21: mol_type = other RNA; note = Description of Artificial Sequence: Synthetic oligonucleotide
tatgtgttccatagatatatt

SEQ ID NO: 19897 - RNA, 21 nt, synthetic construct
  source 1..21: mol_type = other RNA; note = Description of Artificial Sequence: Synthetic oligonucleotide
atgtgttccatagatatcatt

SEQ ID NO: 19898 - RNA, 21 nt, synthetic construct
  source 1..21: mol_type = other RNA; note = Description of Artificial Sequence: Synthetic oligonucleotide
tgtgttccatagatatctatt

SEQ ID NO: 19899 - RNA, 21 nt, synthetic construct
  source 1..21: mol_type = other RNA; note = Description of Artificial Sequence: Synthetic oligonucleotide
gtgttccatagatatcttatt

SEQ ID NO: 19900 - RNA, 21 nt, synthetic construct
  source 1..21: mol_type = other RNA; note = Description of Artificial Sequence: Synthetic oligonucleotide
tgttccatagatatcttaatt

SEQ ID NO: 19901 - RNA, 21 nt, synthetic construct
  source 1..21: mol_type = other RNA; note = Description of Artificial Sequence: Synthetic oligonucleotide
gttccatagatatcttaaatt

SEQ ID NO: 19902 - RNA, 21 nt, synthetic construct
  source 1..21: mol_type = other RNA; note = Description of Artificial Sequence: Synthetic oligonucleotide
ttccatagatatcttaatatt

SEQ ID NO: 19903 - RNA, 21 nt, synthetic construct
  source 1..21: mol_type = other RNA; note = Description of Artificial Sequence: Synthetic oligonucleotide
tccatagatatcttaatgatt

SEQ ID NO: 19904 - RNA, 21 nt, synthetic construct
  source 1..21: mol_type = other RNA; note = Description of Artificial Sequence: Synthetic oligonucleotide
ccatagatatcttaatgtatt

SEQ ID NO: 19905 - RNA, 21 nt, synthetic construct
  source 1..21: mol_type = other RNA; note = Description of Artificial Sequence: Synthetic oligonucleotide
catagatatcttaatgtaatt

SEQ ID NO: 19906 - RNA, 21 nt, synthetic construct
  source 1..21: mol_type = other RNA; note = Description of Artificial Sequence: Synthetic oligonucleotide
atagatatcttaatgtaaatt

SEQ ID NO: 19907 - RNA, 21 nt, synthetic construct
  source 1..21: mol_type = other RNA; note = Description of Artificial Sequence: Synthetic oligonucleotide
tagatatcttaatgtaaaatt

SEQ ID NO: 19908 - RNA, 21 nt, synthetic construct
  source 1..21: mol_type = other RNA; note = Description of Artificial Sequence: Synthetic oligonucleotide
agatatcttaatgtaaaaatt

SEQ ID NO: 19909 - RNA, 21 nt, synthetic construct
  source 1..21: mol_type = other RNA; note = Description of Artificial Sequence: Synthetic oligonucleotide
gatatcttaatgtaaaatatt

SEQ ID NO: 19910 - RNA, 21 nt, synthetic construct
  source 1..21: mol_type = other RNA; note = Description of Artificial Sequence: Synthetic oligonucleotide
atatcttaatgtaaaattatt

SEQ ID NO: 19911 - RNA, 21 nt, synthetic construct
  source 1..21: mol_type = other RNA; note = Description of Artificial Sequence: Synthetic oligonucleotide
tatcttaatgtaaaattaatt

SEQ ID NO: 19912 - RNA, 21 nt, synthetic construct
  source 1..21: mol_type = other RNA; note = Description of Artificial Sequence: Synthetic oligonucleotide
atcttaatgtaaaattagatt

SEQ ID NO: 19913 - RNA, 21 nt, synthetic construct
  source 1..21: mol_type = other RNA; note = Description of Artificial Sequence: Synthetic oligonucleotide
tcttaatgtaaaattagtatt

SEQ ID NO: 19914 - RNA, 21 nt, synthetic construct
  source 1..21: mol_type = other RNA; note = Description of Artificial Sequence: Synthetic oligonucleotide
cttaatgtaaaattagtcatt

SEQ ID NO: 19915 - RNA, 21 nt, synthetic construct
  source 1..21: mol_type = other RNA; note = Description of Artificial Sequence: Synthetic oligonucleotide
ttaatgtaaaattagtcaatt

SEQ ID NO: 19916 - RNA, 21 nt, synthetic construct
  source 1..21: mol_type = other RNA; note = Description of Artificial Sequence: Synthetic oligonucleotide
taatgtaaaattagtcatatt

SEQ ID NO: 19917 - RNA, 21 nt, synthetic construct
  source 1..21: mol_type = other RNA; note = Description of Artificial Sequence: Synthetic oligonucleotide
aatgtaaaattagtcattatt

SEQ ID NO: 19918 - RNA, 21 nt, synthetic construct
  source 1..21: mol_type = other RNA; note = Description of Artificial Sequence: Synthetic oligonucleotide
atgtaaaattagtcatttatt

SEQ ID NO: 19919 - RNA, 21 nt, synthetic construct
  source 1..21: mol_type = other RNA; note = Description of Artificial Sequence: Synthetic oligonucleotide
tgtaaaattagtcatttaatt

SEQ ID NO: 19920 - RNA, 21 nt, synthetic construct
  source 1..21: mol_type = other RNA; note = Description of Artificial Sequence: Synthetic oligonucleotide
gtaaaattagtcatttaaatt

SEQ ID NO: 19921 - RNA, 21 nt, synthetic construct
  source 1..21: mol_type = other RNA; note = Description of Artificial Sequence: Synthetic oligonucleotide
taaaattagtcatttaaaatt

SEQ ID NO: 19922 - RNA, 21 nt, synthetic construct
  source 1..21: mol_type = other RNA; note = Description of Artificial Sequence: Synthetic oligonucleotide
aaaattagtcatttaaatatt

SEQ ID NO: 19923 - RNA, 21 nt, synthetic construct
  source 1..21: mol_type = other RNA; note = Description of Artificial Sequence: Synthetic oligonucleotide
aaattagtcatttaaattatt

SEQ ID NO: 19924 - RNA, 21 nt, synthetic construct
  source 1..21: mol_type = other RNA; note = Description of Artificial Sequence: Synthetic oligonucleotide
aattagtcatttaaattaatt

SEQ ID NO: 19925 - RNA, 21 nt, synthetic construct
  source 1..21: mol_type = other RNA; note = Description of Artificial Sequence: Synthetic oligonucleotide
attagtcatttaaattacatt

SEQ ID NO: 19926 - RNA, 21 nt, synthetic construct
  source 1..21: mol_type = other RNA; note = Description of Artificial Sequence: Synthetic oligonucleotide
ttagtcatttaaattacaatt

SEQ ID NO: 19927 - RNA, 21 nt, synthetic construct
  source 1..21: mol_type = other RNA; note = Description of Artificial Sequence: Synthetic oligonucleotide
tagtcatttaaattacacatt

SEQ ID NO: 19928 - RNA, 21 nt, synthetic construct
  source 1..21: mol_type = other RNA; note = Description of Artificial Sequence: Synthetic oligonucleotide
agtcatttaaattacactatt

SEQ ID NO: 19929 - RNA, 21 nt, synthetic construct
  source 1..21: mol_type = other RNA; note = Description of Artificial Sequence: Synthetic oligonucleotide
gtcatttaaattacactgatt

SEQ ID NO: 19930 - RNA, 21 nt, synthetic construct
  source 1..21: mol_type = other RNA; note = Description of Artificial Sequence: Synthetic oligonucleotide
tcatttaaattacactgtatt

SEQ ID NO: 19931 - RNA, 21 nt, synthetic construct
  source 1..21: mol_type = other RNA; note = Description of Artificial Sequence: Synthetic oligonucleotide
catttaaattacactgtcatt

SEQ ID NO: 19932 - RNA, 21 nt, synthetic construct
  source 1..21: mol_type = other RNA; note = Description of Artificial Sequence: Synthetic oligonucleotide
atttaaattacactgtcaatt

SEQ ID NO: 19933 - RNA, 21 nt, synthetic construct
  source 1..21: mol_type = other RNA; note = Description of Artificial Sequence: Synthetic oligonucleotide
tttaaattacactgtcaaatt

SEQ ID NO: 19934 - RNA, 21 nt, synthetic construct
  source 1..21: mol_type = other RNA; note = Description of Artificial Sequence: Synthetic oligonucleotide
ttaaattacactgtcaatatt

SEQ ID NO: 19935 - RNA, 21 nt, synthetic construct
  source 1..21: mol_type = other RNA; note = Description of Artificial Sequence: Synthetic oligonucleotide
taaattacactgtcaattatt

SEQ ID NO: 19936 - RNA, 21 nt, synthetic construct
  source 1..21: mol_type = other RNA; note = Description of Artificial Sequence: Synthetic oligonucleotide
aaattacactgtcaattaatt

SEQ ID NO: 19937 - RNA, 21 nt, synthetic construct
  source 1..21: mol_type = other RNA; note = Description of Artificial Sequence: Synthetic oligonucleotide
aattacactgtcaattaaatt

SEQ ID NO: 19938 - RNA, 21 nt, synthetic construct
  source 1..21: mol_type = other RNA; note = Description of Artificial Sequence: Synthetic oligonucleotide
attacactgtcaattaaaatt

SEQ ID NO: 19939 - RNA, 21 nt, synthetic construct
  source 1..21: mol_type = other RNA; note = Description of Artificial Sequence: Synthetic oligonucleotide
ttacactgtcaattaaaaatt

SEQ ID NO: 19940 - RNA, 21 nt, synthetic construct
  source 1..21: mol_type = other RNA; note = Description of Artificial Sequence: Synthetic oligonucleotide
tacactgtcaattaaaagatt

SEQ ID NO: 19941 - RNA, 21 nt, synthetic construct
  source 1..21: mol_type = other RNA; note = Description of Artificial Sequence: Synthetic oligonucleotide
acactgtcaattaaaagtatt

SEQ ID NO: 19942 - RNA, 21 nt, synthetic construct
  source 1..21: mol_type = other RNA; note = Description of Artificial Sequence: Synthetic oligonucleotide
cactgtcaattaaaagtaatt

SEQ ID NO: 19943 - RNA, 21 nt, synthetic construct
  source 1..21: mol_type = other RNA; note = Description of Artificial Sequence: Synthetic oligonucleotide
actgtcaattaaaagtaaatt

SEQ ID NO: 19944 - RNA, 21 nt, synthetic construct
  source 1..21: mol_type = other RNA; note = Description of Artificial Sequence: Synthetic oligonucleotide
ctgtcaattaaaagtaatatt

SEQ ID NO: 19945 - RNA, 21 nt, synthetic construct
  source 1..21: mol_type = other RNA; note = Description of Artificial Sequence: Synthetic oligonucleotide
tgtcaattaaaagtaatgatt

SEQ ID NO: 19946 - RNA, 21 nt, synthetic construct
  source 1..21: mol_type = other RNA; note = Description of Artificial Sequence: Synthetic oligonucleotide
gtcaattaaaagtaatggatt

SEQ ID NO: 19947 - RNA, 21 nt, synthetic construct
  source 1..21: mol_type = other RNA; note = Description of Artificial Sequence: Synthetic oligonucleotide
tcaattaaaagtaatgggatt

SEQ ID NO: 19948 - RNA, 21 nt, synthetic construct
  source 1..21: mol_type = other RNA; note = Description of Artificial Sequence: Synthetic oligonucleotide
caattaaaagtaatgggcatt

SEQ ID NO: 19949 - RNA, 21 nt, synthetic construct
  source 1..21: mol_type = other RNA; note = Description of Artificial Sequence: Synthetic oligonucleotide
aattaaaagtaatgggcaatt

SEQ ID NO: 19950 - RNA, 21 nt, synthetic construct
  source 1..21: mol_type = other RNA; note = Description of Artificial Sequence: Synthetic oligonucleotide
attaaaagtaatgggcaaatt

SEQ ID NO: 19951 - RNA, 21 nt, synthetic construct
  source 1..21: mol_type = other RNA; note = Description of Artificial Sequence: Synthetic oligonucleotide
ttaaaagtaatgggcaagatt

SEQ ID NO: 19952 - RNA, 21 nt, synthetic construct
  source 1..21: mol_type = other RNA; note = Description of Artificial Sequence: Synthetic oligonucleotide
taaaagtaatgggcaagaatt

SEQ ID NO: 19953 - RNA, 21 nt, synthetic construct
  source 1..21: mol_type = other RNA; note = Description of Artificial Sequence: Synthetic oligonucleotide
aaaagtaatgggcaagagatt

SEQ ID NO: 19954 - RNA, 21 nt, synthetic construct
  source 1..21: mol_type = other RNA; note = Description of Artificial Sequence: Synthetic oligonucleotide
aaagtaatgggcaagagaatt

SEQ ID NO: 19955 - RNA, 21 nt, synthetic construct
  source 1..21: mol_type = other RNA; note = Description of Artificial Sequence: Synthetic oligonucleotide
aagtaatgggcaagagatatt

SEQ ID NO: 19956 - RNA, 21 nt, synthetic construct
  source 1..21: mol_type = other RNA; note = Description of Artificial Sequence: Synthetic oligonucleotide
agtaatgggcaagagattatt

SEQ ID NO: 19957 - RNA, 21 nt, synthetic construct
  source 1..21: mol_type = other RNA; note = Description of Artificial Sequence: Synthetic oligonucleotide
gtaatgggcaagagattgatt

SEQ ID NO: 19958 - RNA, 21 nt, synthetic construct
  source 1..21: mol_type = other RNA; note = Description of Artificial Sequence: Synthetic oligonucleotide
taatgggcaagagattgcatt

SEQ ID NO: 19959 - RNA, 21 nt, synthetic construct
  source 1..21: mol_type = other RNA; note = Description of Artificial Sequence: Synthetic oligonucleotide
aatgggcaagagattgcaatt

SEQ ID NO: 19960 - RNA, 21 nt, synthetic construct
  source 1..21: mol_type = other RNA; note = Description of Artificial Sequence: Synthetic oligonucleotide
atgggcaagagattgcatatt

SEQ ID NO: 19961 - RNA, 21 nt, synthetic construct
  source 1..21: mol_type = other RNA; note = Description of Artificial Sequence: Synthetic oligonucleotide
tgggcaagagattgcatcatt

SEQ ID NO: 19962 - RNA, 21 nt, synthetic construct
  source 1..21: mol_type = other RNA; note = Description of Artificial Sequence: Synthetic oligonucleotide
gggcaagagattgcatcaatt

SEQ ID NO: 19963 - RNA, 21 nt, synthetic construct
  source 1..21: mol_type = other RNA; note = Description of Artificial Sequence: Synthetic oligonucleotide
ggcaagagattgcatcatatt

SEQ ID NO: 19964 - RNA, 21 nt, synthetic construct
  source 1..21: mol_type = other RNA; note = Description of Artificial Sequence: Synthetic oligonucleotide
gcaagagattgcatcataatt

SEQ ID NO: 19965 - RNA, 21 nt, synthetic construct
  source 1..21: mol_type = other RNA; note = Description of Artificial Sequence: Synthetic oligonucleotide
caagagattgcatcatacatt

SEQ ID NO: 19966 - RNA, 21 nt, synthetic construct
  source 1..21: mol_type = other RNA; note = Description of Artificial Sequence: Synthetic oligonucleotide
aagagattgcatcatactatt

SEQ ID NO: 19967 - RNA, 21 nt, synthetic construct
  source 1..21: mol_type = other RNA; note = Description of Artificial Sequence: Synthetic oligonucleotide
agagattgcatcatactaatt

SEQ ID NO: 19968 - RNA, 21 nt, synthetic construct
  source 1..21: mol_type = other RNA; note = Description of Artificial Sequence: Synthetic oligonucleotide
gagattgcatcatactaaatt

SEQ ID NO: 19969 - RNA, 21 nt, synthetic construct
  source 1..21: mol_type = other RNA; note = Description of Artificial Sequence: Synthetic oligonucleotide
agattgcatcatactaatatt

SEQ ID NO: 19970 - RNA, 21 nt, synthetic construct
  source 1..21: mol_type = other RNA; note = Description of Artificial Sequence: Synthetic oligonucleotide
gattgcatcatactaattatt

SEQ ID NO: 19971 - RNA, 21 nt, synthetic construct
  source 1..21: mol_type = other RNA; note = Description of Artificial Sequence: Synthetic oligonucleotide
attgcatcatactaatttatt

SEQ ID NO: 19972 - RNA, 21 nt, synthetic construct
  source 1..21: mol_type = other RNA; note = Description of Artificial Sequence: Synthetic oligonucleotide
ttgcatcatactaatttaatt

SEQ ID NO: 19973 - RNA, 21 nt, synthetic construct
  source 1..21: mol_type = other RNA; note = Description of Artificial Sequence: Synthetic oligonucleotide
tgcatcatactaatttagatt

SEQ ID NO: 19974 - RNA, 21 nt, synthetic construct
  source 1..21: mol_type = other RNA; note = Description of Artificial Sequence: Synthetic oligonucleotide
gcatcatactaatttagtatt

SEQ ID NO: 19975 - RNA, 21 nt, synthetic construct
  source 1..21: mol_type = other RNA; note = Description of Artificial Sequence: Synthetic oligonucleotide
catcatactaatttagtaatt

SEQ ID NO: 19976 - RNA, 21 nt, synthetic construct
  source 1..21: mol_type = other RNA; note = Description of Artificial Sequence: Synthetic oligonucleotide
atcatactaatttagtaaatt

SEQ ID NO: 19977 - RNA, 21 nt, synthetic construct
  source 1..21: mol_type = other RNA; note = Description of Artificial Sequence: Synthetic oligonucleotide
tcatactaatttagtaagatt

SEQ ID NO: 19978 - RNA, 21 nt, synthetic construct
  source 1..21: mol_type = other RNA; note = Description of Artificial Sequence: Synthetic oligonucleotide
catactaatttagtaagaatt

SEQ ID NO: 19979 - RNA, 21 nt, synthetic construct
  source 1..21: mol_type = other RNA; note = Description of Artificial Sequence: Synthetic oligonucleotide
atactaatttagtaagaaatt

SEQ ID NO: 19980 - RNA, 21 nt, synthetic construct
  source 1..21: mol_type = other RNA; note = Description of Artificial Sequence: Synthetic oligonucleotide
tactaatttagtaagaacatt

SEQ ID NO: 19981 - RNA, 21 nt, synthetic construct
  source 1..21: mol_type = other RNA; note = Description of Artificial Sequence: Synthetic oligonucleotide
actaatttagtaagaacgatt

SEQ ID NO: 19982 - RNA, 21 nt, synthetic construct
  source 1..21: mol_type = other RNA; note = Description of Artificial Sequence: Synthetic oligonucleotide
ctaatttagtaagaacgtatt

SEQ ID NO: 19983 - RNA, 21 nt, synthetic construct
  source 1..21: mol_type = other RNA; note = Description of Artificial Sequence: Synthetic oligonucleotide
taatttagtaagaacgttatt

SEQ ID NO: 19984 - RNA, 21 nt, synthetic construct
  source 1..21: mol_type = other RNA; note = Description of Artificial Sequence: Synthetic oligonucleotide
aatttagtaagaacgttcatt

SEQ ID NO: 19985 - RNA, 21 nt, synthetic construct
  source 1..21: mol_type = other RNA; note = Description of Artificial Sequence: Synthetic oligonucleotide
atttagtaagaacgttccatt

SEQ ID NO: 19986 - RNA, 21 nt, synthetic construct
  source 1..21: mol_type = other RNA; note = Description of Artificial Sequence: Synthetic oligonucleotide
tttagtaagaacgttcccatt

SEQ ID NO: 19987 - RNA, 21 nt, synthetic construct
  source 1..21: mol_type = other RNA; note = Description of Artificial Sequence: Synthetic oligonucleotide
ttagtaagaacgttcccaatt

SEQ ID NO: 19988 - RNA, 21 nt, synthetic construct
  source 1..21: mol_type = other RNA; note = Description of Artificial Sequence: Synthetic oligonucleotide
tagtaagaacgttcccaaatt

SEQ ID NO: 19989 - RNA, 21 nt, synthetic construct
  source 1..21: mol_type = other RNA; note = Description of Artificial Sequence: Synthetic oligonucleotide
agtaagaacgttcccaaaatt

SEQ ID NO: 19990 - RNA, 21 nt, synthetic construct
  source 1..21: mol_type = other RNA; note = Description of Artificial Sequence: Synthetic oligonucleotide
gtaagaacgttcccaaatatt

SEQ ID NO: 19991 - RNA, 21 nt, synthetic construct
  source 1..21: mol_type = other RNA; note = Description of Artificial Sequence: Synthetic oligonucleotide
taagaacgttcccaaatgatt

SEQ ID NO: 19992 - RNA, 21 nt, synthetic construct
  source 1..21: mol_type = other RNA; note = Description of Artificial Sequence: Synthetic oligonucleotide
aagaacgttcccaaatgtatt

SEQ ID NO: 19993 - RNA, 21 nt, synthetic construct
  source 1..21: mol_type = other RNA; note = Description of Artificial Sequence: Synthetic oligonucleotide
agaacgttcccaaatgttatt

SEQ ID NO: 19994 - RNA, 21 nt, synthetic construct
  source 1..21: mol_type = other RNA; note = Description of Artificial Sequence: Synthetic oligonucleotide
gaacgttcccaaatgttgatt

SEQ ID NO: 19995 - RNA, 21 nt, synthetic construct
  source 1..21: mol_type = other RNA; note = Description of Artificial Sequence: Synthetic oligonucleotide
aacgttcccaaatgttgtatt

SEQ ID NO: 19996 - RNA, 21 nt, synthetic construct
  source 1..21: mol_type = other RNA; note = Description of Artificial Sequence: Synthetic oligonucleotide
acgttcccaaatgttgtaatt

SEQ ID NO: 19997 - RNA, 21 nt, synthetic construct
  source 1..21: mol_type = other RNA; note = Description of Artificial Sequence: Synthetic oligonucleotide
cgttcccaaatgttgtaaatt

SEQ ID NO: 19998 - RNA, 21 nt, synthetic construct
  source 1..21: mol_type = other RNA; note = Description of Artificial Sequence: Synthetic oligonucleotide
gttcccaaatgttgtaacatt

SEQ ID NO: 19999 - RNA, 21 nt, synthetic construct
  source 1..21: mol_type = other RNA; note = Description of Artificial Sequence: Synthetic oligonucleotide
ttcccaaatgttgtaacaatt

SEQ ID NO: 20000 - RNA, 21 nt, synthetic construct
  source 1..21: mol_type = other RNA; note = Description of Artificial Sequence: Synthetic oligonucleotide
tcccaaatgttgtaacaaatt

SEQ ID NO: 20001 - RNA, 21 nt, synthetic construct
  source 1..21: mol_type = other RNA; note = Description of Artificial Sequence: Synthetic oligonucleotide
cccaaatgttgtaacaatatt

SEQ ID NO: 20002 - RNA, 21 nt, synthetic construct
  source 1..21: mol_type = other RNA; note = Description of Artificial Sequence: Synthetic oligonucleotide
ccaaatgttgtaacaatgatt

SEQ ID NO: 20003 - RNA, 21 nt, synthetic construct
  source 1..21: mol_type = other RNA; note = Description of Artificial Sequence: Synthetic oligonucleotide
caaatgttgtaacaatgtatt

SEQ ID NO: 20004 - RNA, 21 nt, synthetic construct
  source 1..21: mol_type = other RNA; note = Description of Artificial Sequence: Synthetic oligonucleotide
aaatgttgtaacaatgtgatt

SEQ ID NO: 20005 - RNA, 21 nt, synthetic construct
  source 1..21: mol_type = other RNA; note = Description of Artificial Sequence: Synthetic oligonucleotide
aatgttgtaacaatgtggatt

SEQ ID NO: 20006 - RNA, 21 nt, synthetic construct
  source 1..21: mol_type = other RNA; note = Description of Artificial Sequence: Synthetic oligonucleotide
atgttgtaacaatgtggaatt

SEQ ID NO: 20007 - RNA, 21 nt, synthetic construct
  source 1..21: mol_type = other RNA; note = Description of Artificial Sequence: Synthetic oligonucleotide
tgttgtaacaatgtggatatt

SEQ ID NO: 20008 - RNA, 21 nt, synthetic construct
  source 1..21: mol_type = other RNA; note = Description of Artificial Sequence: Synthetic oligonucleotide
gttgtaacaatgtggatcatt

SEQ ID NO: 20009 - RNA, 21 nt, synthetic construct
  source 1..21: mol_type = other RNA; note = Description of Artificial Sequence: Synthetic oligonucleotide
ttgtaacaatgtggatcaatt

SEQ ID NO: 20010 - RNA, 21 nt, synthetic construct
  source 1..21: mol_type = other RNA; note = Description of Artificial Sequence: Synthetic oligonucleotide
tgtaacaatgtggatcatatt

SEQ ID NO: 20011 - RNA, 21 nt, synthetic construct
  source 1..21: mol_type = other RNA; note = Description of Artificial Sequence: Synthetic oligonucleotide
gtaacaatgtggatcataatt

SEQ ID NO: 20012 - RNA, 21 nt, synthetic construct
  source 1..21: mol_type = other RNA; note = Description of Artificial Sequence: Synthetic oligonucleotide
taacaatgtggatcatacatt

SEQ ID NO: 20013 - RNA, 21 nt, synthetic construct
  source 1..21: mol_type = other RNA; note = Description of Artificial Sequence: Synthetic oligonucleotide
aacaatgtggatcatacaatt

SEQ ID NO: 20014 - RNA, 21 nt, synthetic construct
  source 1..21: mol_type = other RNA; note = Description of Artificial Sequence: Synthetic oligonucleotide
acaatgtggatcatacatatt

SEQ ID NO: 20015 - RNA, 21 nt, synthetic construct
  source 1..21: mol_type = other RNA; note = Description of Artificial Sequence: Synthetic oligonucleotide
caatgtggatcatacatcatt

SEQ ID NO: 20016 - RNA, 21 nt, synthetic construct
  source 1..21: mol_type = other RNA; note = Description of Artificial Sequence: Synthetic oligonucleotide
aatgtggatcatacatctatt

SEQ ID NO: 20017 - RNA, 21 nt, synthetic construct
  source 1..21: mol_type = other RNA; note = Description of Artificial Sequence: Synthetic oligonucleotide
atgtggatcatacatctcatt

SEQ ID NO: 20018 - RNA, 21 nt, synthetic construct
  source 1..21: mol_type = other RNA; note = Description of Artificial Sequence: Synthetic oligonucleotide
tgtggatcatacatctctatt

SEQ ID NO: 20019 - RNA, 21 nt, synthetic construct
  source 1..21: mol_type = other RNA; note = Description of Artificial Sequence: Synthetic oligonucleotide
gtggatcatacatctctgatt

SEQ ID NO: 20020 - RNA, 21 nt, synthetic construct
  source 1..21: mol_type = other RNA; note = Description of Artificial Sequence: Synthetic oligonucleotide
tggatcatacatctctggatt

SEQ ID NO: 20021 - RNA, 21 nt, synthetic construct
  source 1..21: mol_type = other RNA; note = Description of Artificial Sequence: Synthetic oligonucleotide
ggatcatacatctctggtatt

SEQ ID NO: 20022 - RNA, 21 nt, synthetic construct
  source 1..21: mol_type = other RNA; note = Description of Artificial Sequence: Synthetic oligonucleotide
gatcatacatctctggttatt

SEQ ID NO: 20023 - RNA, 21 nt, synthetic construct
  source 1..21: mol_type = other RNA; note = Description of Artificial Sequence: Synthetic oligonucleotide
atcatacatctctggtttatt

SEQ ID NO: 20024 - RNA, 21 nt, synthetic construct
  source 1..21: mol_type = other RNA; note = Description of Artificial Sequence: Synthetic oligonucleotide
tcatacatctctggttttatt

SEQ ID NO: 20025 - RNA, 21 nt, synthetic construct
  source 1..21: mol_type = other RNA; note = Description of Artificial Sequence: Synthetic oligonucleotide
catacatctctggtttttatt

SEQ ID NO: 20026 - RNA, 21 nt, synthetic construct
  source 1..21: mol_type = other RNA; note = Description of Artificial Sequence: Synthetic oligonucleotide
atacatctctggttttttatt

SEQ ID NO: 20027 - RNA, 21 nt, synthetic construct
  source 1..21: mol_type = other RNA; note = Description of Artificial Sequence: Synthetic oligonucleotide
tacatctctggttttttaatt

SEQ ID NO: 20028 - RNA, 21 nt, synthetic construct
  source 1..21: mol_type = other RNA; note = Description of Artificial Sequence: Synthetic oligonucleotide
acatctctggttttttaaatt

SEQ ID NO: 20029 - RNA, 21 nt, synthetic construct
  source 1..21: mol_type = other RNA; note = Description of Artificial Sequence: Synthetic oligonucleotide
catctctggttttttaaaatt

SEQ ID NO: 20030 - RNA, 21 nt, synthetic construct
  source 1..21: mol_type = other RNA; note = Description of Artificial Sequence: Synthetic oligonucleotide
atctctggttttttaaatatt

SEQ ID NO: 20031 - RNA, 21 nt, synthetic construct
  source 1..21: mol_type = other RNA; note = Description of Artificial Sequence: Synthetic oligonucleotide
tctctggttttttaaatgatt

SEQ ID NO: 20032 - RNA, 21 nt, synthetic construct
  source 1..21: mol_type = other RNA; note = Description of Artificial Sequence: Synthetic oligonucleotide
ctctggttttttaaatgtatt

SEQ ID NO: 20033 - RNA, 21 nt, synthetic construct
  source 1..21: mol_type = other RNA; note = Description of Artificial Sequence: Synthetic oligonucleotide
tctggttttttaaatgtaatt

SEQ ID NO: 20034 - RNA, 21 nt, synthetic construct
  source 1..21: mol_type = other RNA; note = Description of Artificial Sequence: Synthetic oligonucleotide
ctggttttttaaatgtatatt

SEQ ID NO: 20035 - RNA, 21 nt, synthetic construct
  source 1..21: mol_type = other RNA; note = Description of Artificial Sequence: Synthetic oligonucleotide
tggttttttaaatgtattatt

SEQ ID NO: 20036 - RNA, 21 nt, synthetic construct
  source 1..21: mol_type = other RNA; note = Description of Artificial Sequence: Synthetic oligonucleotide
ggttttttaaatgtattgatt

SEQ ID NO: 20037 - RNA, 21 nt, synthetic construct
  source 1..21: mol_type = other RNA; note = Description of Artificial Sequence: Synthetic oligonucleotide
gttttttaaatgtattgaatt

SEQ ID NO: 20038 - RNA, 21 nt, synthetic construct
  source 1..21: mol_type = other RNA; note = Description of Artificial Sequence: Synthetic oligonucleotide
ttttttaaatgtattgagatt

SEQ ID NO: 20039 - RNA, 21 nt, synthetic construct
  source 1..21: mol_type = other RNA; note = Description of Artificial Sequence: Synthetic oligonucleotide
tttttaaatgtattgaggatt

SEQ ID NO: 20040 - RNA, 21 nt, synthetic construct
  source 1..21: mol_type = other RNA; note = Description of Artificial Sequence: Synthetic oligonucleotide
ttttaaatgtattgaggcatt

SEQ ID NO: 20041 - RNA, 21 nt, synthetic construct
  source 1..21: mol_type = other RNA; note = Description of Artificial Sequence: Synthetic oligonucleotide
tttaaatgtattgaggctatt

SEQ ID NO: 20042 - RNA, 21 nt, synthetic construct
  source 1..21: mol_type = other RNA; note = Description of Artificial Sequence: Synthetic oligonucleotide
ttaaatgtattgaggcttatt

SEQ ID NO: 20043 - RNA, 21 nt, synthetic construct
  source 1..21: mol_type = other RNA; note = Description of Artificial Sequence: Synthetic oligonucleotide
taaatgtattgaggctttatt

SEQ ID NO: 20044 - RNA, 21 nt, synthetic construct
  source 1..21: mol_type = other RNA; note = Description of Artificial Sequence: Synthetic oligonucleotide
aaatgtattgaggctttcatt

SEQ ID NO: 20045 - RNA, 21 nt, synthetic construct
  source 1..21: mol_type = other RNA; note = Description of Artificial Sequence: Synthetic oligonucleotide
aatgtattgaggctttctatt

SEQ ID NO: 20046 - RNA, 21 nt, synthetic construct
  source 1..21: mol_type = other RNA; note = Description of Artificial Sequence: Synthetic oligonucleotide
atgtattgaggctttcttatt

SEQ ID NO: 20047 - RNA, 21 nt, synthetic construct
  source 1..21: mol_type = other RNA; note = Description of Artificial Sequence: Synthetic oligonucleotide
tgtattgaggctttcttgatt

SEQ ID NO: 20048 - RNA, 21 nt, synthetic construct
  source 1..21: mol_type = other RNA; note = Description of Artificial Sequence: Synthetic oligonucleotide
gtattgaggctttcttggatt

SEQ ID NO: 20049 - RNA, 21 nt, synthetic construct
  source 1..21: mol_type = other RNA; note = Description of Artificial Sequence: Synthetic oligonucleotide
tattgaggctttcttggtatt

SEQ ID NO: 20050 - RNA, 21 nt, synthetic construct
  source 1..21: mol_type = other RNA; note = Description of Artificial Sequence: Synthetic oligonucleotide
attgaggctttcttggtgatt

SEQ ID NO: 20051 - RNA, 21 nt, synthetic construct
  source 1..21: mol_type = other RNA; note = Description of Artificial Sequence: Synthetic oligonucleotide
ttgaggctttcttggtggatt

SEQ ID NO: 20052 - RNA, 21 nt, synthetic construct
  source 1..21: mol_type = other RNA; note = Description of Artificial Sequence: Synthetic oligonucleotide
tgaggctttcttggtggaatt

SEQ ID NO: 20053 - RNA, 21 nt, synthetic construct
  source 1..21: mol_type = other RNA; note = Description of Artificial Sequence: Synthetic oligonucleotide
gaggctttcttggtggacatt

SEQ ID NO: 20054 - RNA, 21 nt, synthetic construct
  source 1..21: mol_type = other RNA; note = Description of Artificial Sequence: Synthetic oligonucleotide
aggctttcttggtggactatt

SEQ ID NO: 20055 - RNA, 21 nt, synthetic construct
  source 1..21: mol_type = other RNA; note = Description of Artificial Sequence: Synthetic oligonucleotide
ggctttcttggtggactaatt

SEQ ID NO: 20056 - RNA, 21 nt, synthetic construct
  source 1..21: mol_type = other RNA; note = Description of Artificial Sequence: Synthetic oligonucleotide
gctttcttggtggactagatt

SEQ ID NO: 20057 - RNA, 21 nt, synthetic construct
  source 1..21: mol_type = other RNA; note = Description of Artificial Sequence: Synthetic oligonucleotide
ctttcttggtggactagtatt

SEQ ID NO: 20058 - RNA, 21 nt, synthetic construct
  source 1..21: mol_type = other RNA; note = Description of Artificial Sequence: Synthetic oligonucleotide
tttcttggtggactagtaatt

SEQ ID NO: 20059 - RNA, 21 nt, synthetic construct
  source 1..21: mol_type = other RNA; note = Description of Artificial Sequence: Synthetic oligonucleotide
ttcttggtggactagtatatt

SEQ ID NO: 20060 - RNA, 21 nt, synthetic construct
  source 1..21: mol_type = other RNA; note = Description of Artificial Sequence: Synthetic oligonucleotide
tcttggtggactagtataatt

SEQ ID NO: 20061 - RNA, 21 nt, synthetic construct
  source 1..21: mol_type = other RNA; note = Description of Artificial Sequence: Synthetic oligonucleotide
cttggtggactagtatagatt

SEQ ID NO: 20062 - RNA, 21 nt, synthetic construct
  source 1..21: mol_type = other RNA; note = Description of Artificial Sequence: Synthetic oligonucleotide
ttggtggactagtatagtatt

SEQ ID NO: 20063 - RNA, 21 nt, synthetic construct
  source 1..21: mol_type = other RNA; note = Description of Artificial Sequence: Synthetic oligonucleotide
tggtggactagtatagtaatt

SEQ ID NO: 20064 - RNA, 21 nt, synthetic construct
  source 1..21: mol_type = other RNA; note = Description of Artificial Sequence: Synthetic oligonucleotide
ggtggactagtatagtatatt

SEQ ID NO: 20065 - RNA, 21 nt, synthetic construct
  source 1..21: mol_type = other RNA; note = Description of Artificial Sequence: Synthetic oligonucleotide
gtggactagtatagtataatt

SEQ ID NO: 20066 - RNA, 21 nt, synthetic construct
  source 1..21: mol_type = other RNA; note = Description of Artificial Sequence: Synthetic oligonucleotide
tggactagtatagtatacatt

SEQ ID NO: 20067 - RNA, 21 nt, synthetic construct
  source 1..21: mol_type = other RNA; note = Description of Artificial Sequence: Synthetic oligonucleotide
ggactagtatagtatacgatt

SEQ ID NO: 20068 - RNA, 21 nt, synthetic construct
  source 1..21: mol_type = other RNA; note = Description of Artificial Sequence: Synthetic oligonucleotide
gactagtatagtatacggatt

SEQ ID NO: 20069 - RNA, 21 nt, synthetic construct
  source 1..21: mol_type = other RNA; note = Description of Artificial Sequence: Synthetic oligonucleotide
actagtatagtatacggtatt

SEQ ID NO: 20070 - RNA, 21 nt, synthetic construct
  source 1..21: mol_type = other RNA; note = Description of Artificial Sequence: Synthetic oligonucleotide
ctagtatagtatacggtcatt

SEQ ID NO: 20071 - RNA, 21 nt, synthetic construct
  source 1..21: mol_type = other RNA; note = Description of Artificial Sequence: Synthetic oligonucleotide
tagtatagtatacggtcaatt

SEQ ID NO: 20072 - RNA, 21 nt, synthetic construct
  source 1..21: mol_type = other RNA; note = Description of Artificial Sequence: Synthetic oligonucleotide
agtatagtatacggtcagatt

SEQ ID NO: 20073 - RNA, 21 nt, synthetic construct
  source 1..21: mol_type = other RNA; note = Description of Artificial Sequence: Synthetic oligonucleotide
gtatagtatacggtcagtatt

SEQ ID NO: 20074 - RNA, 21 nt, synthetic construct
  source 1..21: mol_type = other RNA; note = Description of Artificial Sequence: Synthetic oligonucleotide
tatagtatacggtcagttatt

SEQ ID NO: 20075 - RNA, 21 nt, synthetic construct
  source 1..21: mol_type = other RNA; note = Description of Artificial Sequence: Synthetic oligonucleotide
atagtatacggtcagttaatt

SEQ ID NO: 20076 - RNA, 21 nt, synthetic construct
  source 1..21: mol_type = other RNA; note = Description of Artificial Sequence: Synthetic oligonucleotide
tagtatacggtcagttatatt

SEQ ID NO: 20077 - RNA, 21 nt, synthetic construct
  source 1..21: mol_type = other RNA; note = Description of Artificial Sequence: Synthetic oligonucleotide
agtatacggtcagttatgatt

SEQ ID NO: 20078 - RNA, 21 nt, synthetic construct
  source 1..21: mol_type = other RNA; note = Description of Artificial Sequence: Synthetic oligonucleotide
gtatacggtcagttatgtatt

SEQ ID NO: 20079 - RNA, 21 nt, synthetic construct
  source 1..21: mol_type = other RNA; note = Description of Artificial Sequence: Synthetic oligonucleotide
tatacggtcagttatgtcatt

SEQ ID NO: 20080 - RNA, 21 nt, synthetic construct
  source 1..21: mol_type = other RNA; note = Description of Artificial Sequence: Synthetic oligonucleotide
atacggtcagttatgtcaatt

SEQ ID NO: 20081 - RNA, 21 nt, synthetic construct
  source 1..21: mol_type = other RNA; note = Description of Artificial Sequence: Synthetic oligonucleotide
tacggtcagttatgtcaaatt

SEQ ID NO: 20082 - RNA, 21 nt, synthetic construct
  source 1..21: mol_type = other RNA; note = Description of Artificial Sequence: Synthetic oligonucleotide
acggtcagttatgtcaatatt

SEQ ID NO: 20083 - RNA, 21 nt, synthetic construct
  source 1..21: mol_type = other RNA; note = Description of Artificial Sequence: Synthetic oligonucleotide
cggtcagttatgtcaatgatt

SEQ ID NO: 20084 - RNA, 21 nt, synthetic construct
  source 1..21: mol_type = other RNA; note = Description of Artificial Sequence: Synthetic oligonucleotide
ggtcagttatgtcaatgtatt

SEQ ID NO: 20085 - RNA, 21 nt, synthetic construct
  source 1..21: mol_type = other RNA; note = Description of Artificial Sequence: Synthetic oligonucleotide
gtcagttatgtcaatgttatt

SEQ ID NO: 20086 - RNA, 21 nt, synthetic construct
  source 1..21: mol_type = other RNA; note = Description of Artificial Sequence: Synthetic oligonucleotide
tcagttatgtcaatgtttatt

SEQ ID NO: 20087 - RNA, 21 nt, synthetic construct
  source 1..21: mol_type = other RNA; note = Description of Artificial Sequence: Synthetic oligonucleotide
cagttatgtcaatgtttcatt

SEQ ID NO: 20088 - RNA, 21 nt, synthetic construct
  source 1..21: mol_type = other RNA; note = Description of Artificial Sequence: Synthetic oligonucleotide
agttatgtcaatgtttcaatt

SEQ ID NO: 20089 - RNA, 21 nt, synthetic construct
  source 1..21: mol_type = other RNA; note = Description of Artificial Sequence: Synthetic oligonucleotide
gttatgtcaatgtttcatatt

SEQ ID NO: 20090 - RNA, 21 nt, synthetic construct
  source 1..21: mol_type = other RNA; note = Description of Artificial Sequence: Synthetic oligonucleotide
ttatgtcaatgtttcatgatt

SEQ ID NO: 20091 - RNA, 21 nt, synthetic construct
  source 1..21: mol_type = other RNA; note = Description of Artificial Sequence: Synthetic oligonucleotide
tatgtcaatgtttcatggatt

SEQ ID NO: 20092 - RNA, 21 nt, synthetic construct
  source 1..21: mol_type = other RNA; note = Description of Artificial Sequence: Synthetic oligonucleotide
atgtcaatgtttcatggtatt

SEQ ID NO: 20093 - RNA, 21 nt, synthetic construct
  source 1..21: mol_type = other RNA; note = Description of Artificial Sequence: Synthetic oligonucleotide
tgtcaatgtttcatggtcatt

SEQ ID NO: 20094 - RNA, 21 nt, synthetic construct
  source 1..21: mol_type = other RNA; note = Description of Artificial Sequence: Synthetic oligonucleotide
gtcaatgtttcatggtcaatt

SEQ ID NO: 20095 - RNA, 21 nt, synthetic construct
  source 1..21: mol_type = other RNA; note = Description of Artificial Sequence: Synthetic oligonucleotide
tcaatgtttcatggtcaaatt

SEQ ID NO: 20096 - RNA, 21 nt, synthetic construct
  source 1..21: mol_type = other RNA; note = Description of Artificial Sequence: Synthetic oligonucleotide
caatgtttcatggtcaatatt

SEQ ID NO: 20097 - RNA, 21 nt, synthetic construct
  source 1..21: mol_type = other RNA; note = Description of Artificial Sequence: Synthetic oligonucleotide
aatgtttcatggtcaataatt

SEQ ID NO: 20098 - RNA, 21 nt, synthetic construct
  source 1..21: mol_type = other RNA; note = Description of Artificial Sequence: Synthetic oligonucleotide
atgtttcatggtcaataaatt

SEQ ID NO: 20099 - RNA, 21 nt, synthetic construct
  source 1..21: mol_type = other RNA; note = Description of Artificial Sequence: Synthetic oligonucleotide
tgtttcatggtcaataaaatt

SEQ ID NO: 20100 - RNA, 21 nt, synthetic construct
  source 1..21: mol_type = other RNA; note = Description of Artificial Sequence: Synthetic oligonucleotide
gtttcatggtcaataaaaatt

SEQ ID NO: 20101 - RNA, 21 nt, synthetic construct
  source 1..21: mol_type = other RNA; note = Description of Artificial Sequence: Synthetic oligonucleotide
tttcatggtcaataaaaaatt

SEQ ID NO: 20102 - RNA, 21 nt, synthetic construct
  source 1..21: mol_type = other RNA; note = Description of Artificial Sequence: Synthetic oligonucleotide
ttcatggtcaataaaaagatt

SEQ ID NO: 20103 - RNA, 21 nt, synthetic construct
  source 1..21: mol_type = other RNA; note = Description of Artificial Sequence: Synthetic oligonucleotide
tcatggtcaataaaaaggatt

SEQ ID NO: 20104 - RNA, 21 nt, synthetic construct
  source 1..21: mol_type = other RNA; note = Description of Artificial Sequence: Synthetic oligonucleotide
catggtcaataaaaaggaatt

SEQ ID NO: 20105 - RNA, 21 nt, synthetic construct
  source 1..21: mol_type = other RNA; note = Description of Artificial Sequence: Synthetic oligonucleotide
atggtcaataaaaaggaaatt

SEQ ID NO: 20106 - RNA, 21 nt, synthetic construct
  source 1..21: mol_type = other RNA; note = Description of Artificial Sequence: Synthetic oligonucleotide
tggtcaataaaaaggaagatt

SEQ ID NO: 20107 - RNA, 21 nt, synthetic construct
  source 1..21: mol_type = other RNA; note = Description of Artificial Sequence: Synthetic oligonucleotide
ggtcaataaaaaggaagtatt

SEQ ID NO: 20108 - RNA, 21 nt, synthetic construct
  source 1..21: mol_type = other RNA; note = Description of Artificial Sequence: Synthetic oligonucleotide
gtcaataaaaaggaagttatt

SEQ ID NO: 20109 - RNA, 21 nt, synthetic construct
  source 1..21: mol_type = other RNA; note = Description of Artificial Sequence: Synthetic oligonucleotide
tcaataaaaaggaagttgatt

SEQ ID NO: 20110 - RNA, 21 nt, synthetic construct
  source 1..21: mol_type = other RNA; note = Description of Artificial Sequence: Synthetic oligonucleotide
caataaaaaggaagttgcatt

SEQ ID NO: 20111 - RNA, 21 nt, synthetic construct
  source 1..21: mol_type = other RNA; note = Description of Artificial Sequence: Synthetic oligonucleotide
aataaaaaggaagttgcaatt

SEQ ID NO: 20112 - RNA, 21 nt, synthetic construct
  source 1..21: mol_type = other RNA; note = Description of Artificial Sequence: Synthetic oligonucleotide
ataaaaaggaagttgcaaatt

SEQ ID NO: 20113 - RNA, 21 nt, synthetic construct
  source 1..21: mol_type = other RNA; note = Description of Artificial Sequence: Synthetic oligonucleotide
taaaaaggaagttgcaaaatt

SEQ ID NO: 20114 - RNA, 21 nt, synthetic construct
  source 1..21: mol_type = other RNA; note = Description of Artificial Sequence: Synthetic oligonucleotide
aaaaaggaagttgcaaatatt

SEQ ID NO: 20115 - RNA, 21 nt, synthetic construct
  source 1..21: mol_type = other RNA; note = Description of Artificial Sequence: Synthetic oligonucleotide
aaaaggaagttgcaaattatt

SEQ ID NO: 20116 - RNA, 21 nt, synthetic construct
  source 1..21: mol_type = other RNA; note = Description of Artificial Sequence: Synthetic oligonucleotide
aaaggaagttgcaaattgatt

SEQ ID NO: 20117 - RNA, 21 nt, synthetic construct
  source 1..21: mol_type = other RNA; note = Description of Artificial Sequence: Synthetic oligonucleotide
aaggaagttgcaaattgtatt

SEQ ID NO: 20118 - RNA, 21 nt, synthetic construct
  source 1..21: mol_type = other RNA; note = Description of Artificial Sequence: Synthetic oligonucleotide
aggaagttgcaaattgtgatt

SEQ ID NO: 20119 - RNA, 21 nt, synthetic construct
  source 1..21: mol_type = other RNA; note = Description of Artificial Sequence: Synthetic oligonucleotide
atcagggagactccaactatt

SEQ ID NO: 20120 - RNA, 21 nt, synthetic construct
  source 1..21: mol_type = other RNA; note = Description of Artificial Sequence: Synthetic oligonucleotide
tcagggagactccaacttatt

SEQ ID NO: 20121 - RNA, 21 nt, synthetic construct
  source 1..21: mol_type = other RNA; note = Description of Artificial Sequence: Synthetic oligonucleotide
cagggagactccaacttaatt

SEQ ID NO: 20122 - RNA, 21 nt, synthetic construct
  source 1..21: mol_type = other RNA; note = Description of Artificial Sequence: Synthetic oligonucleotide
agggagactccaacttaaatt

SEQ ID NO: 20123 - RNA, 21 nt, synthetic construct
  source 1..21: mol_type = other RNA; note = Description of Artificial Sequence: Synthetic oligonucleotide
gggagactccaacttaagatt

SEQ ID NO: 20124 - RNA, 21 nt, synthetic construct
  source 1..21: mol_type = other RNA; note = Description of Artificial Sequence: Synthetic oligonucleotide
ggagactccaacttaaggatt

SEQ ID NO: 20125 - RNA, 21 nt, synthetic construct
  source 1..21: mol_type = other RNA; note = Description of Artificial Sequence: Synthetic oligonucleotide
gagactccaacttaaggcatt

SEQ ID NO: 20126 - RNA, 21 nt, synthetic construct
  source 1..21: mol_type = other RNA; note = Description of Artificial Sequence: Synthetic oligonucleotide
agactccaacttaaggcaatt

SEQ ID NO: 20127 - RNA, 21 nt, synthetic construct
  source 1..21: mol_type = other RNA; note = Description of Artificial Sequence: Synthetic oligonucleotide
gactccaacttaaggcaaatt

SEQ ID NO: 20128 - RNA, 21 nt, synthetic construct
  source 1..21: mol_type = other RNA; note = Description of Artificial Sequence: Synthetic oligonucleotide
actccaacttaaggcaacatt

SEQ ID NO: 20129 - RNA, 21 nt, synthetic construct
  source 1..21: mol_type = other RNA; note = Description of Artificial Sequence: Synthetic oligonucleotide
ctccaacttaaggcaacaatt

SEQ ID NO: 20130 - RNA, 21 nt, synthetic construct
  source 1..21: mol_type = other RNA; note = Description of Artificial Sequence: Synthetic oligonucleotide
tccaacttaaggcaacagatt

SEQ ID NO: 20131 - RNA, 21 nt, synthetic construct
  source 1..21: mol_type = other RNA; note = Description of Artificial Sequence: Synthetic oligonucleotide
ccaacttaaggcaacagcatt

SEQ ID NO: 20132 - RNA, 21 nt, synthetic construct
  source 1..21: mol_type = other RNA; note = Description of Artificial Sequence: Synthetic oligonucleotide
caacttaaggcaacagcaatt

SEQ ID NO: 20133 - RNA, 21 nt, synthetic construct
  source 1..21: mol_type = other RNA; note = Description of Artificial Sequence: Synthetic oligonucleotide
aacttaaggcaacagcatatt

SEQ ID NO: 20134 - RNA, 21 nt, synthetic construct
  source 1..21: mol_type = other RNA; note = Description of Artificial Sequence: Synthetic oligonucleotide
acttaaggcaacagcatgatt

SEQ ID NO: 20135 - RNA, 21 nt, synthetic construct
  source 1..21: mol_type = other RNA; note = Description of Artificial Sequence: Synthetic oligonucleotide
cttaaggcaacagcatggatt

SEQ ID NO: 20136 - RNA, 21 nt, synthetic construct
  source 1..21: mol_type = other RNA; note = Description of Artificial Sequence: Synthetic oligonucleotide
ttaaggcaacagcatgggatt

SEQ ID NO: 20137 - RNA, 21 nt, synthetic construct
  source 1..21: mol_type = other RNA; note = Description of Artificial Sequence: Synthetic oligonucleotide
taaggcaacagcatgggtatt

SEQ ID NO: 20138 - RNA, 21 nt, synthetic construct
  source 1..21: mol_type = other RNA; note = Description of Artificial Sequence: Synthetic oligonucleotide
aaggcaacagcatgggtgatt

SEQ ID NO: 20139 - RNA, 21 nt, synthetic construct
  source 1..21: mol_type = other RNA; note = Description of Artificial Sequence: Synthetic oligonucleotide
aggcaacagcatgggtgaatt

SEQ ID NO: 20140 - RNA, 21 nt, synthetic construct
  source 1..21: mol_type = other RNA; note = Description of Artificial Sequence: Synthetic oligonucleotide
ggcaacagcatgggtgaaatt

SEQ ID NO: 20141 - RNA, 21 nt, synthetic construct
  source 1..21: mol_type = other RNA; note = Description of Artificial Sequence: Synthetic oligonucleotide
gcaacagcatgggtgaatatt

SEQ ID NO: 20142 - RNA, 21 nt, synthetic construct
  source 1..21: mol_type = other RNA; note = Description of Artificial Sequence: Synthetic oligonucleotide
caacagcatgggtgaataatt

SEQ ID NO: 20143 - RNA, 21 nt, synthetic construct
  source 1..21: mol_type = other RNA; note = Description of Artificial Sequence: Synthetic oligonucleotide
aacagcatgggtgaataaatt

SEQ ID NO: 20144 - RNA, 21 nt, synthetic construct
  source 1..21: mol_type = other RNA; note = Description of Artificial Sequence: Synthetic oligonucleotide
acagcatgggtgaataagatt

SEQ ID NO: 20145 - RNA, 21 nt, synthetic construct
  source 1..21: mol_type = other RNA; note = Description of Artificial Sequence: Synthetic oligonucleotide
cagcatgggtgaataaggatt

SEQ ID NO: 20146 - RNA, 21 nt, synthetic construct
  source 1..21: mol_type = other RNA; note = Description of Artificial Sequence: Synthetic oligonucleotide
agcatgggtgaataagggatt

SEQ ID NO: 20147 - RNA, 21 nt, synthetic construct
  source 1..21: mol_type = other RNA; note = Description of Artificial Sequence: Synthetic oligonucleotide
gcatgggtgaataagggcatt

SEQ ID NO: 20148 - RNA, 21 nt, synthetic construct
  source 1..21: mol_type = other RNA; note = Description of Artificial Sequence: Synthetic oligonucleotide
catgggtgaataagggctatt

SEQ ID NO: 20149 - RNA, 21 nt, synthetic construct
  source 1..21: mol_type = other RNA; note = Description of Artificial Sequence: Synthetic oligonucleotide
atgggtgaataagggcttatt

SEQ ID NO: 20150 - RNA, 21 nt, synthetic construct
  source 1..21: mol_type = other RNA; note = Description of Artificial Sequence: Synthetic oligonucleotide
tgggtgaataagggcttcatt

SEQ ID NO: 20151 - RNA, 21 nt, synthetic construct
  source 1..21: mol_type = other RNA; note = Description of Artificial Sequence: Synthetic oligonucleotide
gggtgaataagggcttccatt

SEQ ID NO: 20152 - RNA, 21 nt, synthetic construct
  source 1..21: mol_type = other RNA; note = Description of Artificial Sequence: Synthetic oligonucleotide
ggtgaataagggcttcctatt

SEQ ID NO: 20153 - RNA, 21 nt, synthetic construct
  source 1..21: mol_type = other RNA; note = Description of Artificial Sequence: Synthetic oligonucleotide
gtgaataagggcttcctgatt

SEQ ID NO: 20154 - RNA, 21 nt, synthetic construct
  source 1..21: mol_type = other RNA; note = Description of Artificial Sequence: Synthetic oligonucleotide
tgaataagggcttcctgtatt

SEQ ID NO: 20155 - RNA, 21 nt, synthetic construct
  source 1..21: mol_type = other RNA; note = Description of Artificial Sequence: Synthetic oligonucleotide
gaataagggcttcctgtgatt

SEQ ID NO: 20156 - RNA, 21 nt, synthetic construct
  source 1..21: mol_type = other RNA; note = Description of Artificial Sequence: Synthetic oligonucleotide
aataagggcttcctgtggatt

SEQ ID NO: 20157 - RNA, 21 nt, synthetic construct
  source 1..21: mol_type = other RNA; note = Description of Artificial Sequence: Synthetic oligonucleotide
ataagggcttcctgtggaatt

SEQ ID NO: 20158 - RNA, 21 nt, synthetic construct
  source 1..21: mol_type = other RNA; note = Description of Artificial Sequence: Synthetic oligonucleotide
taagggcttcctgtggacatt

SEQ ID NO: 20159 - RNA, 21 nt, synthetic construct
  source 1..21: mol_type = other RNA; note = Description of Artificial Sequence: Synthetic oligonucleotide
aagggcttcctgtggactatt

SEQ ID NO: 20160 - RNA, 21 nt, synthetic construct
  source 1..21: mol_type = other RNA; note = Description of Artificial Sequence: Synthetic oligonucleotide
agggcttcctgtggactgatt

SEQ ID NO: 20161 - RNA, 21 nt, synthetic construct
  source 1..21: mol_type = other RNA; note = Description of Artificial Sequence: Synthetic oligonucleotide
gggcttcctgtggactggatt

SEQ ID NO: 20162 - RNA, 21 nt, synthetic construct
  source 1..21: mol_type = other RNA; note = Description of Artificial Sequence: Synthetic oligonucleotide
ggcttcctgtggactggcatt

SEQ ID NO: 20163 - RNA, 21 nt, synthetic construct
  source 1..21: mol_type = other RNA; note = Description of Artificial Sequence: Synthetic oligonucleotide
gcttcctgtggactggcaatt

SEQ ID NO: 20164 - RNA, 21 nt, synthetic construct
  source 1..21: mol_type = other RNA; note = Description of Artificial Sequence: Synthetic oligonucleotide
cttcctgtggactggcaaatt

SEQ ID NO: 20165 - RNA, 21 nt, synthetic construct
  source 1..21: mol_type = other RNA; note = Description of Artificial Sequence: Synthetic oligonucleotide
ttcctgtggactggcaatatt

SEQ ID NO: 20166 - RNA, 21 nt, synthetic construct
  source 1..21: mol_type = other RNA; note = Description of Artificial Sequence: Synthetic oligonucleotide
tcctgtggactggcaatgatt

SEQ ID NO: 20167 - RNA, 21 nt, synthetic construct
  source 1..21: mol_type = other RNA; note = Description of Artificial Sequence: Synthetic oligonucleotide
cctgtggactggcaatgaatt

SEQ ID NO: 20168 - RNA, 21 nt, synthetic construct
  source 1..21: mol_type = other RNA; note = Description of Artificial Sequence: Synthetic oligonucleotide
ctgtggactggcaatgagatt

SEQ ID NO: 20169 - RNA, 21 nt, synthetic construct
  source 1..21: mol_type = other RNA; note = Description of Artificial Sequence: Synthetic oligonucleotide
tgtggactggcaatgagaatt

SEQ ID NO: 20170 - RNA, 21 nt, synthetic construct
  source 1..21: mol_type = other RNA; note = Description of Artificial Sequence: Synthetic oligonucleotide
gtggactggcaatgagagatt

SEQ ID NO: 20171 - RNA, 21 nt, synthetic construct
  source 1..21: mol_type = other RNA; note = Description of Artificial Sequence: Synthetic oligonucleotide
tggactggcaatgagaggatt

SEQ ID NO: 20172 - RNA, 21 nt, synthetic construct
  source 1..21: mol_type = other RNA; note = Description of Artificial Sequence: Synthetic oligonucleotide
ggactggcaatgagaggcatt

SEQ ID NO: 20173 - RNA, 21 nt, synthetic construct
  source 1..21: mol_type = other RNA; note = Description of Artificial Sequence: Synthetic oligonucleotide
gactggcaatgagaggcaatt

SEQ ID NO: 20174 - RNA, 21 nt, synthetic construct
  source 1..21: mol_type = other RNA; note = Description of Artificial Sequence: Synthetic oligonucleotide
actggcaatgagaggcaaatt

SEQ ID NO: 20175 - RNA, 21 nt, synthetic construct
  source 1..21: mol_type = other RNA; note = Description of Artificial Sequence: Synthetic oligonucleotide
ctggcaatgagaggcaaaatt

SEQ ID NO: 20176 - RNA, 21 nt, synthetic construct
  source 1..21: mol_type = other RNA; note = Description of Artificial Sequence: Synthetic oligonucleotide
tggcaatgagaggcaaaaatt

SEQ ID NO: 20177 - RNA, 21 nt, synthetic construct
  source 1..21: mol_type = other RNA; note = Description of Artificial Sequence: Synthetic oligonucleotide
ggcaatgagaggcaaaacatt

SEQ ID NO: 20178 - RNA, 21 nt, synthetic construct
  source 1..21: mol_type = other RNA; note = Description of Artificial Sequence: Synthetic oligonucleotide
gcaatgagaggcaaaaccatt

SEQ ID NO: 20179 - RNA, 21 nt, synthetic construct
  source 1..21: mol_type = other RNA; note = Description of Artificial Sequence: Synthetic oligonucleotide
caatgagaggcaaaacctatt

SEQ ID NO: 20180 - RNA, 21 nt, synthetic construct
  source 1..21: mol_type = other RNA; note = Description of Artificial Sequence: Synthetic oligonucleotide
aatgagaggcaaaacctgatt

SEQ ID NO: 20181 - RNA, 21 nt, synthetic construct
  source 1..21: mol_type = other RNA; note = Description of Artificial Sequence: Synthetic oligonucleotide
atgagaggcaaaacctggatt

SEQ ID NO: 20182 - RNA, 21 nt, synthetic construct
  source 1..21: mol_type = other RNA; note = Description of Artificial Sequence: Synthetic oligonucleotide
tgagaggcaaaacctggtatt

SEQ ID NO: 20183 - RNA, 21 nt, synthetic construct
  source 1..21: mol_type = other RNA; note = Description of Artificial Sequence: Synthetic oligonucleotide
gagaggcaaaacctggtgatt

SEQ ID NO: 20184 - RNA, 21 nt, synthetic construct
  source 1..21: mol_type = other RNA; note = Description of Artificial Sequence: Synthetic oligonucleotide
agaggcaaaacctggtgcatt

SEQ ID NO: 20185 - RNA, 21 nt, synthetic construct
  source 1..21: mol_type = other RNA; note = Description of Artificial Sequence: Synthetic oligonucleotide
gaggcaaaacctggtgctatt

SEQ ID NO: 20186 - RNA, 21 nt, synthetic construct
  source 1..21: mol_type = other RNA; note = Description of Artificial Sequence: Synthetic oligonucleotide
aggcaaaacctggtgcttatt

SEQ ID NO: 20187 - RNA, 21 nt, synthetic construct
  source 1..21: mol_type = other RNA; note = Description of Artificial Sequence: Synthetic oligonucleotide
ggcaaaacctggtgcttgatt

SEQ ID NO: 20188 - RNA, 21 nt, synthetic construct
  source 1..21: mol_type = other RNA; note = Description of Artificial Sequence: Synthetic oligonucleotide
gcaaaacctggtgcttgaatt

SEQ ID NO: 20189 - RNA, 21 nt, synthetic construct
  source 1..21: mol_type = other RNA; note = Description of Artificial Sequence: Synthetic oligonucleotide
caaaacctggtgcttgagatt

SEQ ID NO: 20190 - RNA, 21 nt, synthetic construct
  source 1..21: mol_type = other RNA; note = Description of Artificial Sequence: Synthetic oligonucleotide
aaaacctggtgcttgagcatt

SEQ ID NO: 20191 - RNA, 21 nt, synthetic construct
  source 1..21: mol_type = other RNA; note = Description of Artificial Sequence: Synthetic oligonucleotide
aaacctggtgcttgagcaatt

SEQ ID NO: 20192 - RNA, 21 nt, synthetic construct
  source 1..21: mol_type = other RNA; note = Description of Artificial Sequence: Synthetic oligonucleotide
aacctggtgcttgagcacatt

SEQ ID NO: 20193 - RNA, 21 nt, synthetic construct
  source 1..21: mol_type = other RNA; note = Description of Artificial Sequence: Synthetic oligonucleotide
acctggtgcttgagcactatt

SEQ ID NO: 20194 - RNA, 21 nt, synthetic construct
  source 1..21: mol_type = other RNA; note = Description of Artificial Sequence: Synthetic oligonucleotide
cctggtgcttgagcactgatt

SEQ ID NO: 20195 - RNA, 21 nt, synthetic construct
  source 1..21: mol_type = other RNA; note = Description of Artificial Sequence: Synthetic oligonucleotide
ctggtgcttgagcactggatt

SEQ ID NO: 20196 - RNA, 21 nt, synthetic construct
  source 1..21: mol_type = other RNA; note = Description of Artificial Sequence: Synthetic oligonucleotide
tggtgcttgagcactggcatt

SEQ ID NO: 20197 - RNA, 21 nt, synthetic construct
  source 1..21: mol_type = other RNA; note = Description of Artificial Sequence: Synthetic oligonucleotide
ggtgcttgagcactggccatt

SEQ ID NO: 20198 - RNA, 21 nt, synthetic construct
  source 1..21: mol_type = other RNA; note = Description of Artificial Sequence: Synthetic oligonucleotide
gtgcttgagcactggcccatt

SEQ ID NO: 20199 - RNA, 21 nt, synthetic construct
  source 1..21: mol_type = other RNA; note = Description of Artificial Sequence: Synthetic oligonucleotide
tgcttgagcactggccccatt

SEQ ID NO: 20200 - RNA, 21 nt, synthetic construct
  source 1..21: mol_type = other RNA; note = Description of Artificial Sequence: Synthetic oligonucleotide
gcttgagcactggcccctatt

SEQ ID NO: 20201 - RNA, 21 nt, synthetic construct
  source 1..21: mol_type = other RNA; note = Description of Artificial Sequence: Synthetic oligonucleotide
cttgagcactggcccctaatt

SEQ ID NO: 20202 - RNA, 21 nt, synthetic construct
  source 1..21: mol_type = other RNA; note = Description of Artificial Sequence: Synthetic oligonucleotide
ttgagcactggcccctaaatt

SEQ ID NO: 20203 - RNA, 21 nt, synthetic construct
  source 1..21: mol_type = other RNA; note = Description of Artificial Sequence: Synthetic oligonucleotide
tgagcactggcccctaagatt

SEQ ID NO: 20204 - RNA, 21 nt, synthetic construct
  source 1..21: mol_type = other RNA; note = Description of Artificial Sequence: Synthetic oligonucleotide
gagcactggcccctaaggatt

SEQ ID NO: 20205 - RNA, 21 nt, synthetic construct
  source 1..21: mol_type = other RNA; note = Description of Artificial Sequence: Synthetic oligonucleotide
agcactggcccctaaggcatt

SEQ ID NO: 20206 - RNA, 21 nt, synthetic construct
  source 1..21: mol_type = other RNA; note = Description of Artificial Sequence: Synthetic oligonucleotide
gcactggcccctaaggcaatt

SEQ ID NO: 20207 - RNA, 21 nt, synthetic construct
  source 1..21: mol_type = other RNA; note = Description of Artificial Sequence: Synthetic oligonucleotide
cactggcccctaaggcagatt

SEQ ID NO: 20208 - RNA, 21 nt, synthetic construct
  source 1..21: mol_type = other RNA; note = Description of Artificial Sequence: Synthetic oligonucleotide
actggcccctaaggcaggatt

SEQ ID NO: 20209 - RNA, 21 nt, synthetic construct
  source 1..21: mol_type = other RNA; note = Description of Artificial Sequence: Synthetic oligonucleotide
ctggcccctaaggcaggcatt

SEQ ID NO: 20210 - RNA, 21 nt, synthetic construct
  source 1..21: mol_type = other RNA; note = Description of Artificial Sequence: Synthetic oligonucleotide
tggcccctaaggcaggccatt

SEQ ID NO: 20211 - RNA, 21 nt, synthetic construct
  source 1..21: mol_type = other RNA; note = Description of Artificial Sequence: Synthetic oligonucleotide
ggcccctaaggcaggcctatt

SEQ ID NO: 20212 - RNA, 21 nt, synthetic construct
  source 1..21: mol_type = other RNA; note = Description of Artificial Sequence: Synthetic oligonucleotide
gcccctaaggcaggccttatt

SEQ ID NO: 20213 - RNA, 21 nt, synthetic construct
  source 1..21: mol_type = other RNA; note = Description of Artificial Sequence: Synthetic oligonucleotide
cccctaaggcaggccttaatt

SEQ ID NO: 20214 - RNA, 21 nt, synthetic construct
  source 1..21: mol_type = other RNA; note = Description of Artificial Sequence: Synthetic oligonucleotide
ccctaaggcaggccttacatt

SEQ ID NO: 20215 - RNA, 21 nt, synthetic construct
  source 1..21: mol_type = other RNA; note = Description of Artificial Sequence: Synthetic oligonucleotide
cctaaggcaggccttacaatt

SEQ ID NO: 20216 - RNA, 21 nt, synthetic construct
  source 1..21: mol_type = other RNA; note = Description of Artificial Sequence: Synthetic oligonucleotide
ctaaggcaggccttacagatt

SEQ ID NO: 20217 - RNA, 21 nt, synthetic construct
  source 1..21: mol_type = other RNA; note = Description of Artificial Sequence: Synthetic oligonucleotide
taaggcaggccttacagaatt

SEQ ID NO: 20218 - RNA, 21 nt, synthetic construct
  source 1..21: mol_type = other RNA; note = Description of Artificial Sequence: Synthetic oligonucleotide
aaggcaggccttacagatatt

SEQ ID NO: 20219 - RNA, 21 nt, synthetic construct
  source 1..21: mol_type = other RNA; note = Description of Artificial Sequence: Synthetic oligonucleotide
aggcaggccttacagatcatt

SEQ ID NO: 20220 - RNA, 21 nt, synthetic construct
  source 1..21: mol_type = other RNA; note = Description of Artificial Sequence: Synthetic oligonucleotide
ggcaggccttacagatctatt

SEQ ID NO: 20221 - RNA, 21 nt, synthetic construct
  source 1..21: mol_type = other RNA; note = Description of Artificial Sequence: Synthetic oligonucleotide
gcaggccttacagatctcatt

SEQ ID NO: 20222 - RNA, 21 nt, synthetic construct
  source 1..21: mol_type = other RNA; note = Description of Artificial Sequence: Synthetic oligonucleotide
caggccttacagatctctatt

SEQ ID NO: 20223 - RNA, 21 nt, synthetic construct
  source 1..21: mol_type = other RNA; note = Description of Artificial Sequence: Synthetic oligonucleotide
aggccttacagatctcttatt

SEQ ID NO: 20224 - RNA, 21 nt, synthetic construct
  source 1..21: mol_type = other RNA; note = Description of Artificial Sequence: Synthetic oligonucleotide
ggccttacagatctcttaatt

SEQ ID NO: 20225 - RNA, 21 nt, synthetic construct
  source 1..21: mol_type = other RNA; note = Description of Artificial Sequence: Synthetic oligonucleotide
gccttacagatctcttacatt

SEQ ID NO: 20226 - RNA, 21 nt, synthetic construct
  source 1..21: mol_type = other RNA; note = Description of Artificial Sequence: Synthetic oligonucleotide
ccttacagatctcttacaatt

SEQ ID NO: 20227 - RNA, 21 nt, synthetic construct
  source 1..21: mol_type = other RNA; note = Description of Artificial Sequence: Synthetic oligonucleotide
cttacagatctcttacacatt

SEQ ID NO: 20228 - RNA, 21 nt, synthetic construct
  source 1..21: mol_type = other RNA; note = Description of Artificial Sequence: Synthetic oligonucleotide
ttacagatctcttacactatt

SEQ ID NO: 20229 - RNA, 21 nt, synthetic construct
  source 1..21: mol_type = other RNA; note = Description of Artificial Sequence: Synthetic oligonucleotide
tacagatctcttacactcatt

SEQ ID NO: 20230 - RNA, 21 nt, synthetic construct
  source 1..21: mol_type = other RNA; note = Description of Artificial Sequence: Synthetic oligonucleotide
acagatctcttacactcgatt

SEQ ID NO: 20231 - RNA, 21 nt, synthetic construct
  source 1..21: mol_type = other RNA; note = Description of Artificial Sequence: Synthetic oligonucleotide
cagatctcttacactcgtatt

SEQ ID NO: 20232 - RNA, 21 nt, synthetic construct
  source 1..21: mol_type = other RNA; note = Description of Artificial Sequence: Synthetic oligonucleotide
agatctcttacactcgtgatt

SEQ ID NO: 20233 - RNA, 21 nt, synthetic construct
  source 1..21: mol_type = other RNA; note = Description of Artificial Sequence: Synthetic oligonucleotide
gatctcttacactcgtggatt

SEQ ID NO: 20234 - RNA, 21 nt, synthetic construct
  source 1..21: mol_type = other RNA; note = Description of Artificial Sequence: Synthetic oligonucleotide
atctcttacactcgtggtatt

SEQ ID NO: 20235 - RNA, 21 nt, synthetic construct
  source 1..21: mol_type = other RNA; note = Description of Artificial Sequence: Synthetic oligonucleotide
tctcttacactcgtggtgatt

SEQ ID NO: 20236 - RNA, 21 nt, synthetic construct
  source 1..21: mol_type = other RNA; note = Description of Artificial Sequence: Synthetic oligonucleotide
ctcttacactcgtggtggatt

SEQ ID NO: 20237 - RNA, 21 nt, synthetic construct
  source 1..21: mol_type = other RNA; note = Description of Artificial Sequence: Synthetic oligonucleotide
tcttacactcgtggtgggatt

SEQ ID NO: 20238 - RNA, 21 nt, synthetic construct
  source 1..21: mol_type = other RNA; note = Description of Artificial Sequence: Synthetic oligonucleotide
cttacactcgtggtgggaatt

SEQ ID NO: 20239 - RNA, 21 nt, synthetic construct
  source 1..21: mol_type = other RNA; note = Description of Artificial Sequence: Synthetic oligonucleotide
ttacactcgtggtgggaaatt

SEQ ID NO: 20240 - RNA, 21 nt, synthetic construct
  source 1..21: mol_type = other RNA; note = Description of Artificial Sequence: Synthetic oligonucleotide
tacactcgtggtgggaagatt

SEQ ID NO: 20241 - RNA, 21 nt, synthetic construct
  source 1..21: mol_type = other RNA; note = Description of Artificial Sequence: Synthetic oligonucleotide
acactcgtggtgggaagaatt

SEQ ID NO: 20242 - RNA, 21 nt, synthetic construct
  source 1..21: mol_type = other RNA; note = Description of Artificial Sequence: Synthetic oligonucleotide
cactcgtggtgggaagagatt

SEQ ID NO: 20243 - RNA, 21 nt, synthetic construct
  source 1..21: mol_type = other RNA; note = Description of Artificial Sequence: Synthetic oligonucleotide
actcgtggtgggaagagtatt

SEQ ID NO: 20244 - RNA, 21 nt, synthetic construct
  source 1..21: mol_type = other RNA; note = Description of Artificial Sequence: Synthetic oligonucleotide
ctcgtggtgggaagagttatt

SEQ ID NO: 20245 - RNA, 21 nt, synthetic construct
  source 1..21: mol_type = other RNA; note = Description of Artificial Sequence: Synthetic oligonucleotide
tcgtggtgggaagagtttatt

SEQ ID NO: 20246 - RNA, 21 nt, synthetic construct
  source 1..21: mol_type = other RNA; note = Description of Artificial Sequence: Synthetic oligonucleotide
cgtggtgggaagagtttaatt

SEQ ID NO: 20247 - RNA, 21 nt, synthetic construct
  source 1..21: mol_type = other RNA; note = Description of Artificial Sequence: Synthetic oligonucleotide
gtggtgggaagagtttagatt

SEQ ID NO: 20248 - RNA, 21 nt, synthetic construct
  source 1..21: mol_type = other RNA; note = Description of Artificial Sequence: Synthetic oligonucleotide
tggtgggaagagtttagtatt

SEQ ID NO: 20249 - RNA, 21 nt, synthetic construct
  source 1..21: mol_type = other RNA; note = Description of Artificial Sequence: Synthetic oligonucleotide
ggtgggaagagtttagtgatt

SEQ ID NO: 20250 - RNA, 21 nt, synthetic construct
  source 1..21: mol_type = other RNA; note = Description of Artificial Sequence: Synthetic oligonucleotide
gtgggaagagtttagtgtatt

SEQ ID NO: 20251 - RNA, 21 nt, synthetic construct
  source 1..21: mol_type = other RNA; note = Description of Artificial Sequence: Synthetic oligonucleotide
tgggaagagtttagtgtgatt

SEQ ID NO: 20252 - RNA, 21 nt, synthetic construct
  source 1..21: mol_type = other RNA; note = Description of Artificial Sequence: Synthetic oligonucleotide
gggaagagtttagtgtgaatt

SEQ ID NO: 20253 - RNA, 21 nt, synthetic construct
  source 1..21: mol_type = other RNA; note = Description of Artificial Sequence: Synthetic oligonucleotide
ggaagagtttagtgtgaaatt

SEQ ID NO: 20254 - RNA, 21 nt, synthetic construct
  source 1..21: mol_type = other RNA; note = Description of Artificial Sequence: Synthetic oligonucleotide
gaagagtttagtgtgaaaatt

SEQ ID NO: 20255 - RNA, 21 nt, synthetic construct
  source 1..21: mol_type = other RNA; note = Description of Artificial Sequence: Synthetic oligonucleotide
aagagtttagtgtgaaacatt

SEQ ID NO: 20256 - RNA, 21 nt, synthetic construct
  source 1..21: mol_type = other RNA; note = Description of Artificial Sequence: Synthetic oligonucleotide
agagtttagtgtgaaactatt

SEQ ID NO: 20257 - RNA, 21 nt, synthetic construct
  source 1..21: mol_type = other RNA; note = Description of Artificial Sequence: Synthetic oligonucleotide
gagtttagtgtgaaactgatt

SEQ ID NO: 20258 - RNA, 21 nt, synthetic construct
  source 1..21: mol_type = other RNA; note = Description of Artificial Sequence: Synthetic oligonucleotide
agtttagtgtgaaactggatt

SEQ ID NO: 20259 - RNA, 21 nt, synthetic construct
  source 1..21: mol_type = other RNA; note = Description of Artificial Sequence: Synthetic oligonucleotide
gtttagtgtgaaactgggatt

SEQ ID NO: 20260 - RNA, 21 nt, synthetic construct
  source 1..21: mol_type = other RNA; note = Description of Artificial Sequence: Synthetic oligonucleotide
tttagtgtgaaactggggatt

SEQ ID NO: 20261 - RNA, 21 nt, synthetic construct
  source 1..21: mol_type = other RNA; note = Description of Artificial Sequence: Synthetic oligonucleotide
ttagtgtgaaactggggtatt

SEQ ID NO: 20262 - RNA, 21 nt, synthetic construct
  source 1..21: mol_type = other RNA; note = Description of Artificial Sequence: Synthetic oligonucleotide
tagtgtgaaactggggtgatt

SEQ ID NO: 20263 - RNA, 21 nt, synthetic construct
  source 1..21: mol_type = other RNA; note = Description of Artificial Sequence: Synthetic oligonucleotide
agtgtgaaactggggtggatt

SEQ ID NO: 20264 - RNA, 21 nt, synthetic construct
  source 1..21: mol_type = other RNA; note = Description of Artificial Sequence: Synthetic oligonucleotide
gtgtgaaactggggtggaatt

SEQ ID NO: 20265 - RNA, 21 nt, synthetic construct
  source 1..21: mol_type = other RNA; note = Description of Artificial Sequence: Synthetic oligonucleotide
tgtgaaactggggtggaaatt

SEQ ID NO: 20266 - RNA, 21 nt, synthetic construct
  source 1..21: mol_type = other RNA; note = Description of Artificial Sequence: Synthetic oligonucleotide
gtgaaactggggtggaatatt

SEQ ID NO: 20267 - RNA, 21 nt, synthetic construct
  source 1..21: mol_type = other RNA; note = Description of Artificial Sequence: Synthetic oligonucleotide
tgaaactggggtggaattatt

SEQ ID NO: 20268 - RNA, 21 nt, synthetic construct
  source 1..21: mol_type = other RNA; note = Description of Artificial Sequence: Synthetic oligonucleotide
gaaactggggtggaattgatt

SEQ ID NO: 20269 - RNA, 21 nt, synthetic construct
  source 1..21: mol_type = other RNA; note = Description of Artificial Sequence: Synthetic oligonucleotide
aaactggggtggaattggatt

SEQ ID NO: 20270 - RNA, 21 nt, synthetic construct
  source 1..21: mol_type = other RNA; note = Description of Artificial Sequence: Synthetic oligonucleotide
aactggggtggaattgggatt

SEQ ID NO: 20271 - RNA, 21 nt, synthetic construct
  source 1..21: mol_type = other RNA; note = Description of Artificial Sequence: Synthetic oligonucleotide
actggggtggaattgggtatt

SEQ ID NO: 20272 - RNA, 21 nt, synthetic construct
  source 1..21: mol_type = other RNA; note = Description of Artificial Sequence: Synthetic oligonucleotide
ctggggtggaattgggtgatt

SEQ ID NO: 20273 - RNA, 21 nt, synthetic construct
  source 1..21: mol_type = other RNA; note = Description of Artificial Sequence: Synthetic oligonucleotide
tggggtggaattgggtgtatt

SEQ ID NO: 20274 - RNA, 21 nt, synthetic construct
  source 1..21: mol_type = other RNA; note = Description of Artificial Sequence: Synthetic oligonucleotide
ggggtggaattgggtgtcatt

SEQ ID NO: 20275 - RNA, 21 nt, synthetic construct
  source 1..21: mol_type = other RNA; note = Description of Artificial Sequence: Synthetic oligonucleotide
gggtggaattgggtgtccatt

SEQ ID NO: 20276 - RNA, 21 nt, synthetic construct
  source 1..21: mol_type = other RNA; note = Description of Artificial Sequence: Synthetic oligonucleotide
ggtggaattgggtgtccaatt

SEQ ID NO: 20277 - RNA, 21 nt, synthetic construct
  source 1..21: mol_type = other RNA; note = Description of Artificial Sequence: Synthetic oligonucleotide
gtggaattgggtgtccacatt

SEQ ID NO: 20278 - RNA, 21 nt, synthetic construct
  source 1..21: mol_type = other RNA; note = Description of Artificial Sequence: Synthetic oligonucleotide
tggaattgggtgtccacgatt

SEQ ID NO: 20279 - RNA, 21 nt, synthetic construct
  source 1..21: mol_type = other RNA; note = Description of Artificial Sequence: Synthetic oligonucleotide
ggaattgggtgtccacgtatt

SEQ ID NO: 20280 - RNA, 21 nt, synthetic construct
  source 1..21: mol_type = other RNA; note = Description of Artificial Sequence: Synthetic oligonucleotide
gaattgggtgtccacgtaatt

SEQ ID NO: 20281 - RNA, 21 nt, synthetic construct
  source 1..21: mol_type = other RNA; note = Description of Artificial Sequence: Synthetic oligonucleotide
aattgggtgtccacgtatatt

SEQ ID NO: 20282 - RNA, 21 nt, synthetic construct
  source 1..21: mol_type = other RNA; note = Description of Artificial Sequence: Synthetic oligonucleotide
attgggtgtccacgtatgatt

SEQ ID NO: 20283 - RNA, 21 nt, synthetic construct
  source 1..21: mol_type = other RNA; note = Description of Artificial Sequence: Synthetic oligonucleotide
ttgggtgtccacgtatgtatt

SEQ ID NO: 20284 - RNA, 21 nt, synthetic construct
  source 1..21: mol_type = other RNA; note = Description of Artificial Sequence: Synthetic oligonucleotide
tgggtgtccacgtatgttatt

SEQ ID NO: 20285 - RNA, 21 nt, synthetic construct
  source 1..21: mol_type = other RNA; note = Description of Artificial Sequence: Synthetic oligonucleotide
gggtgtccacgtatgttcatt

SEQ ID NO: 20286 - RNA, 21 nt, synthetic construct
  source 1..21: mol_type = other RNA; note = Description of Artificial Sequence: Synthetic oligonucleotide
ggtgtccacgtatgttccatt

SEQ ID NO: 20287 - RNA, 21 nt, synthetic construct
  source 1..21: mol_type = other RNA; note = Description of Artificial Sequence: Synthetic oligonucleotide
gtgtccacgtatgttcccatt

SEQ ID NO: 20288 - RNA, 21 nt, synthetic construct
  source 1..21: mol_type = other RNA; note = Description of Artificial Sequence: Synthetic oligonucleotide
tgtccacgtatgttccctatt

SEQ ID NO: 20289 - RNA, 21 nt, synthetic construct
  source 1..21: mol_type = other RNA; note = Description of Artificial Sequence: Synthetic oligonucleotide
gtccacgtatgttcccttatt

SEQ ID NO: 20290 - RNA, 21 nt, synthetic construct
  source 1..21: mol_type = other RNA; note = Description of Artificial Sequence: Synthetic oligonucleotide
tccacgtatgttccctttatt

SEQ ID NO: 20291 - RNA, 21 nt, synthetic construct
  source 1..21: mol_type = other RNA; note = Description of Artificial Sequence: Synthetic oligonucleotide
ccacgtatgttcccttttatt

SEQ ID NO: 20292 - RNA, 21 nt, synthetic construct
  source 1..21: mol_type = other RNA; note = Description of Artificial Sequence: Synthetic oligonucleotide
cacgtatgttcccttttgatt

SEQ ID NO: 20293 - RNA, 21 nt, synthetic construct
  source 1..21: mol_type = other RNA; note = Description of Artificial Sequence: Synthetic oligonucleotide
acgtatgttcccttttgcatt

SEQ ID NO: 20294 - RNA, 21 nt, synthetic construct
  source 1..21: mol_type = other RNA; note = Description of Artificial Sequence: Synthetic oligonucleotide
cgtatgttcccttttgccatt

SEQ ID NO: 20295 - RNA, 21 nt, synthetic construct
  source 1..21: mol_type = other RNA; note = Description of Artificial Sequence: Synthetic oligonucleotide
gtatgttcccttttgcctatt

SEQ ID NO: 20296 - RNA, 21 nt, synthetic construct
  source 1..21: mol_type = other RNA; note = Description of Artificial Sequence: Synthetic oligonucleotide
tatgttcccttttgccttatt

SEQ ID NO: 20297 - RNA, 21 nt, synthetic construct
  source 1..21: mol_type = other RNA; note = Description of Artificial Sequence: Synthetic oligonucleotide
atgttcccttttgccttaatt

SEQ ID NO: 20298 - RNA, 21 nt, synthetic construct
  source 1..21: mol_type = other RNA; note = Description of Artificial Sequence: Synthetic oligonucleotide
tgttcccttttgccttacatt

SEQ ID NO: 20299 - RNA, 21 nt, synthetic construct
  source 1..21: mol_type = other RNA; note = Description of Artificial Sequence: Synthetic oligonucleotide
gttcccttttgccttactatt

SEQ ID NO: 20300 - RNA, 21 nt, synthetic construct
  source 1..21: mol_type = other RNA; note = Description of Artificial Sequence: Synthetic oligonucleotide
ttcccttttgccttactaatt

SEQ ID NO: 20301 - RNA, 21 nt, synthetic construct
  source 1..21: mol_type = other RNA; note = Description of Artificial Sequence: Synthetic oligonucleotide
tcccttttgccttactatatt

SEQ ID NO: 20302 - RNA, 21 nt, synthetic construct
  source 1..21: mol_type = other RNA; note = Description of Artificial Sequence: Synthetic oligonucleotide
cccttttgccttactataatt

SEQ ID NO: 20303 - RNA, 21 nt, synthetic construct
  source 1..21: mol_type = other RNA; note = Description of Artificial Sequence: Synthetic oligonucleotide
ccttttgccttactatatatt

SEQ ID NO: 20304 - RNA, 21 nt, synthetic construct
  source 1..21: mol_type = other RNA; note = Description of Artificial Sequence: Synthetic oligonucleotide
cttttgccttactatatgatt

SEQ ID NO: 20305 - RNA, 21 nt, synthetic construct
  source 1..21: mol_type = other RNA; note = Description of Artificial Sequence: Synthetic oligonucleotide
ttttgccttactatatgtatt

SEQ ID NO: 20306 - RNA, 21 nt, synthetic construct
  source 1..21: mol_type = other RNA; note = Description of Artificial Sequence: Synthetic oligonucleotide
tttgccttactatatgttatt

SEQ ID NO: 20307 - RNA, 21 nt, synthetic construct
  source 1..21: mol_type = other RNA; note = Description of Artificial Sequence: Synthetic oligonucleotide
ttgccttactatatgttcatt

SEQ ID NO: 20308 - RNA, 21 nt, synthetic construct
  source 1..21: mol_type = other RNA; note = Description of Artificial Sequence: Synthetic oligonucleotide
tgccttactatatgttctatt

SEQ ID NO: 20309 - RNA, 21 nt, synthetic construct
  source 1..21: mol_type = other RNA; note = Description of Artificial Sequence: Synthetic oligonucleotide
gccttactatatgttctgatt

SEQ ID NO: 20310 - RNA, 21 nt, synthetic construct
  source 1..21: mol_type = other RNA; note = Description of Artificial Sequence: Synthetic oligonucleotide
ccttactatatgttctgtatt

SEQ ID NO: 20311 - RNA, 21 nt, synthetic construct
  source 1..21: mol_type = other RNA; note = Description of Artificial Sequence: Synthetic oligonucleotide
cttactatatgttctgtcatt

SEQ ID NO: 20312 - RNA, 21 nt, synthetic construct
  source 1..21: mol_type = other RNA; note = Description of Artificial Sequence: Synthetic oligonucleotide
ttactatatgttctgtcaatt

SEQ ID NO: 20313 - RNA, 21 nt, synthetic construct
  source 1..21: mol_type = other RNA; note = Description of Artificial Sequence: Synthetic oligonucleotide
tactatatgttctgtcagatt

SEQ ID NO: 20314 - RNA, 21 nt, synthetic construct
  source 1..21: mol_type = other RNA; note = Description of Artificial Sequence: Synthetic oligonucleotide
actatatgttctgtcagtatt

SEQ ID NO: 20315 - RNA, 21 nt, synthetic construct
  source 1..21: mol_type = other RNA; note = Description of Artificial Sequence: Synthetic oligonucleotide
ctatatgttctgtcagttatt

SEQ ID NO: 20316 - RNA, 21 nt, synthetic construct
  source 1..21: mol_type = other RNA; note = Description of Artificial Sequence: Synthetic oligonucleotide
tatatgttctgtcagtttatt

SEQ ID NO: 20317 - RNA, 21 nt, synthetic construct
  source 1..21: mol_type = other RNA; note = Description of Artificial Sequence: Synthetic oligonucleotide
atatgttctgtcagtttcatt

SEQ ID NO: 20318 - RNA, 21 nt, synthetic construct
  source 1..21: mol_type = other RNA; note = Description of Artificial Sequence: Synthetic oligonucleotide
tatgttctgtcagtttctatt

SEQ ID NO: 20319 - RNA, 21 nt, synthetic construct
  source 1..21: mol_type = other RNA; note = Description of Artificial Sequence: Synthetic oligonucleotide
atgttctgtcagtttcttatt

SEQ ID NO: 20320 - RNA, 21 nt, synthetic construct
  source 1..21: mol_type = other RNA; note = Description of Artificial Sequence: Synthetic oligonucleotide
tgttctgtcagtttctttatt

SEQ ID NO: 20321 - RNA, 21 nt, synthetic construct
  source 1..21: mol_type = other RNA; note = Description of Artificial Sequence: Synthetic oligonucleotide
gttctgtcagtttctttcatt

SEQ ID NO: 20322 - RNA, 21 nt, synthetic construct
  source 1..21: mol_type = other RNA; note = Description of Artificial Sequence: Synthetic oligonucleotide
ttctgtcagtttctttcaatt

SEQ ID NO: 20323 - RNA, 21 nt, synthetic construct
  source 1..21: mol_type = other RNA; note = Description of Artificial Sequence: Synthetic oligonucleotide
tctgtcagtttctttcagatt

SEQ ID NO: 20324 - RNA, 21 nt, synthetic construct
  source 1..21: mol_type = other RNA; note = Description of Artificial Sequence: Synthetic oligonucleotide
ctgtcagtttctttcaggatt

SEQ ID NO: 20325 - RNA, 21 nt, synthetic construct
  source 1..21: mol_type = other RNA; note = Description of Artificial Sequence: Synthetic oligonucleotide
tgtcagtttctttcaggaatt

SEQ ID NO: 20326 - RNA, 21 nt, synthetic construct
  source 1..21: mol_type = other RNA; note = Description of Artificial Sequence: Synthetic oligonucleotide
gtcagtttctttcaggaaatt

SEQ ID NO: 20327 - RNA, 21 nt, synthetic construct
  source 1..21: mol_type = other RNA; note = Description of Artificial Sequence: Synthetic oligonucleotide
tcagtttctttcaggaaaatt

SEQ ID NO: 20328 - RNA, 21 nt, synthetic construct
  source 1..21: mol_type = other RNA; note = Description of Artificial Sequence: Synthetic oligonucleotide
cagtttctttcaggaaaaatt

SEQ ID NO: 20329 - RNA, 21 nt, synthetic construct
  source 1..21: mol_type = other RNA; note = Description of Artificial Sequence: Synthetic oligonucleotide
agtttctttcaggaaaatatt

SEQ ID NO: 20330 - RNA, 21 nt, synthetic construct
  source 1..21: mol_type = other RNA; note = Description of Artificial Sequence: Synthetic oligonucleotide
gtttctttcaggaaaatcatt

SEQ ID NO: 20331 - RNA, 21 nt, synthetic construct
  source 1..21: mol_type = other RNA; note = Description of Artificial Sequence: Synthetic oligonucleotide
tttctttcaggaaaatctatt

SEQ ID NO: 20332 - RNA, 21 nt, synthetic construct
  source 1..21: mol_type = other RNA; note = Description of Artificial Sequence: Synthetic oligonucleotide
ttctttcaggaaaatcttatt

SEQ ID NO: 20333 - RNA, 21 nt, synthetic construct
  source 1..21: mol_type = other RNA; note = Description of Artificial Sequence: Synthetic oligonucleotide
tctttcaggaaaatcttcatt

SEQ ID NO: 20334 - RNA, 21 nt, synthetic construct
  source 1..21: mol_type = other RNA; note = Description of Artificial Sequence: Synthetic oligonucleotide
ctttcaggaaaatcttcaatt

SEQ ID NO: 20335 - RNA, 21 nt, synthetic construct
  source 1..21: mol_type = other RNA; note = Description of Artificial Sequence: Synthetic oligonucleotide
tttcaggaaaatcttcatatt

SEQ ID NO: 20336 - RNA, 21 nt, synthetic construct
  source 1..21: mol_type = other RNA; note = Description of Artificial Sequence: Synthetic oligonucleotide
ttcaggaaaatcttcatcatt

SEQ ID NO: 20337 - RNA, 21 nt, synthetic construct
  source 1..21: mol_type = other RNA; note = Description of Artificial Sequence: Synthetic oligonucleotide
tcaggaaaatcttcatctatt

SEQ ID NO: 20338 - RNA, 21 nt, synthetic construct
  source 1..21: mol_type = other RNA; note = Description of Artificial Sequence: Synthetic oligonucleotide
caggaaaatcttcatcttatt

SEQ ID NO: 20339 - RNA, 21 nt, synthetic construct
  source 1..21: mol_type = other RNA; note = Description of Artificial Sequence: Synthetic oligonucleotide
aggaaaatcttcatcttaatt

SEQ ID NO: 20340 - RNA, 21 nt, synthetic construct
  source 1..21: mol_type = other RNA; note = Description of Artificial Sequence: Synthetic oligonucleotide
ggaaaatcttcatcttacatt

SEQ ID NO: 20341 - RNA, 21 nt, synthetic construct
  source 1..21: mol_type = other RNA; note = Description of Artificial Sequence: Synthetic oligonucleotide
gaaaatcttcatcttacaatt

SEQ ID NO: 20342 - RNA, 21 nt, synthetic construct
  source 1..21: mol_type = other RNA; note = Description of Artificial Sequence: Synthetic oligonucleotide
aaaatcttcatcttacaaatt

SEQ ID NO: 20343 - RNA, 21 nt, synthetic construct
  source 1..21: mol_type = other RNA; note = Description of Artificial Sequence: Synthetic oligonucleotide
aaatcttcatcttacaacatt

SEQ ID NO: 20344 - RNA, 21 nt, synthetic construct
  source 1..21: mol_type = other RNA; note = Description of Artificial Sequence: Synthetic oligonucleotide
aatcttcatcttacaactatt

SEQ ID NO: 20345 - RNA, 21 nt, synthetic construct
  source 1..21: mol_type = other RNA; note = Description of Artificial Sequence: Synthetic oligonucleotide
atcttcatcttacaacttatt

SEQ ID NO: 20346 - RNA, 21 nt, synthetic construct
  source 1..21: mol_type = other RNA; note = Description of Artificial Sequence: Synthetic oligonucleotide
tcttcatcttacaacttgatt

SEQ ID NO: 20347 - RNA, 21 nt, synthetic construct
  source 1..21: mol_type = other RNA; note = Description of Artificial Sequence: Synthetic oligonucleotide
cttcatcttacaacttgtatt

SEQ ID NO: 20348 - RNA, 21 nt, synthetic construct
  source 1..21: mol_type = other RNA; note = Description of Artificial Sequence: Synthetic oligonucleotide
ttcatcttacaacttgtaatt

SEQ ID NO: 20349 - RNA, 21 nt, synthetic construct
  source 1..21: mol_type = other RNA; note = Description of Artificial Sequence: Synthetic oligonucleotide
tcatcttacaacttgtagatt

SEQ ID NO: 20350 - RNA, 21 nt, synthetic construct
  source 1..21: mol_type = other RNA; note = Description of Artificial Sequence: Synthetic oligonucleotide
catcttacaacttgtaggatt

SEQ ID NO: 20351 - RNA, 21 nt, synthetic construct
  source 1..21: mol_type = other RNA; note = Description of Artificial Sequence: Synthetic oligonucleotide
atcttacaacttgtagggatt

SEQ ID NO: 20352 - RNA, 21 nt, synthetic construct
  source 1..21: mol_type = other RNA; note = Description of Artificial Sequence: Synthetic oligonucleotide
tcttacaacttgtagggcatt

SEQ ID NO: 20353 - RNA, 21 nt, synthetic construct
  source 1..21: mol_type = other RNA; note = Description of Artificial Sequence: Synthetic oligonucleotide
cttacaacttgtagggctatt

SEQ ID NO: 20354 - RNA, 21 nt, synthetic construct
  source 1..21: mol_type = other RNA; note = Description of Artificial Sequence: Synthetic oligonucleotide
ttacaacttgtagggctgatt

SEQ ID NO: 20355 - RNA, 21 nt, synthetic construct
  source 1..21: mol_type = other RNA; note = Description of Artificial Sequence: Synthetic oligonucleotide
tacaacttgtagggctggatt

SEQ ID NO: 20356 - RNA, 21 nt, synthetic construct
  source 1..21: mol_type = other RNA; note = Description of Artificial Sequence: Synthetic oligonucleotide
acaacttgtagggctggtatt

SEQ ID NO: 20357 - RNA, 21 nt, synthetic construct
  source 1..21: mol_type = other RNA; note = Description of Artificial Sequence: Synthetic oligonucleotide
caacttgtagggctggtgatt

SEQ ID NO: 20358 - RNA, 21 nt, synthetic construct
  source 1..21: mol_type = other RNA; note = Description of Artificial Sequence: Synthetic oligonucleotide
aacttgtagggctggtgtatt

SEQ ID NO: 20359 - RNA, 21 nt, synthetic construct
  source 1..21: mol_type = other RNA; note = Description of Artificial Sequence: Synthetic oligonucleotide
acttgtagggctggtgttatt

SEQ ID NO: 20360 - RNA, 21 nt, synthetic construct
  source 1..21: mol_type = other RNA; note = Description of Artificial Sequence: Synthetic oligonucleotide
cttgtagggctggtgttaatt

SEQ ID NO: 20361 - RNA, 21 nt, synthetic construct
  source 1..21: mol_type = other RNA; note = Description of Artificial Sequence: Synthetic oligonucleotide
ttgtagggctggtgttaaatt

SEQ ID NO: 20362 - RNA, 21 nt, synthetic construct
  source 1..21: mol_type = other RNA; note = Description of Artificial Sequence: Synthetic oligonucleotide
tgtagggctggtgttaacatt

SEQ ID NO: 20363 - RNA, 21 nt, synthetic construct
  source 1..21: mol_type = other RNA; note = Description of Artificial Sequence: Synthetic oligonucleotide
gtagggctggtgttaactatt

SEQ ID NO: 20364 - RNA, 21 nt, synthetic construct
  source 1..21: mol_type = other RNA; note = Description of Artificial Sequence: Synthetic oligonucleotide
tagggctggtgttaacttatt

SEQ ID NO: 20365 - RNA, 21 nt, synthetic construct
  source 1..21: mol_type = other RNA; note = Description of Artificial Sequence: Synthetic oligonucleotide
agggctggtgttaacttaatt

SEQ ID NO: 20366 - RNA, 21 nt, synthetic construct
  source 1..21: mol_type = other RNA; note = Description of Artificial Sequence: Synthetic oligonucleotide
gggctggtgttaacttacatt

SEQ ID NO: 20367 - RNA, 21 nt, synthetic construct
  source 1..21: mol_type = other RNA; note = Description of Artificial Sequence: Synthetic oligonucleotide
ggctggtgttaacttacgatt

SEQ ID NO: 20368 - RNA, 21 nt, synthetic construct
  source 1..21: mol_type = other RNA; note = Description of Artificial Sequence: Synthetic oligonucleotide
gctggtgttaacttacgaatt

SEQ ID NO: 20369 - RNA, 21 nt, synthetic construct
  source 1..21: mol_type = other RNA; note = Description of Artificial Sequence: Synthetic oligonucleotide
ctggtgttaacttacgacatt

SEQ ID NO: 20370 - RNA, 21 nt, synthetic construct
  source 1..21: mol_type = other RNA; note = Description of Artificial Sequence: Synthetic oligonucleotide
tggtgttaacttacgactatt

SEQ ID NO: 20371 - RNA, 21 nt, synthetic construct
  source 1..21: mol_type = other RNA; note = Description of Artificial Sequence: Synthetic oligonucleotide
ggtgttaacttacgacttatt

SEQ ID NO: 20372 - RNA, 21 nt, synthetic construct
  source 1..21: mol_type = other RNA; note = Description of Artificial Sequence: Synthetic oligonucleotide
gtgttaacttacgacttcatt

SEQ ID NO: 20373 - RNA, 21 nt, synthetic construct
  source 1..21: mol_type = other RNA; note = Description of Artificial Sequence: Synthetic oligonucleotide
tgttaacttacgacttcaatt

SEQ ID NO: 20374 - RNA, 21 nt, synthetic construct
  source 1..21: mol_type = other RNA; note = Description of Artificial Sequence: Synthetic oligonucleotide
gttaacttacgacttcacatt

SEQ ID NO: 20375 - RNA, 21 nt, synthetic construct
  source 1..21: mol_type = other RNA; note = Description of Artificial Sequence: Synthetic oligonucleotide
ttaacttacgacttcactatt

SEQ ID NO: 20376 - RNA, 21 nt, synthetic construct
  source 1..21: mol_type = other RNA; note = Description of Artificial Sequence: Synthetic oligonucleotide
taacttacgacttcactaatt

SEQ ID NO: 20377 - RNA, 21 nt, synthetic construct
  source 1..21: mol_type = other RNA; note = Description of Artificial Sequence: Synthetic oligonucleotide
aacttacgacttcactaaatt

SEQ ID NO: 20378 - RNA, 21 nt, synthetic construct
  source 1..21: mol_type = other RNA; note = Description of Artificial Sequence: Synthetic oligonucleotide
acttacgacttcactaacatt

SEQ ID NO: 20379 - RNA, 21 nt, synthetic construct
  source 1..21: mol_type = other RNA; note = Description of Artificial Sequence: Synthetic oligonucleotide
cttacgacttcactaactatt

SEQ ID NO: 20380 - RNA, 21 nt, synthetic construct
  source 1..21: mol_type = other RNA; note = Description of Artificial Sequence: Synthetic oligonucleotide
ttacgacttcactaactgatt

SEQ ID NO: 20381 - RNA, 21 nt, synthetic construct
  source 1..21: mol_type = other RNA; note = Description of Artificial Sequence: Synthetic oligonucleotide
tacgacttcactaactgtatt

SEQ ID NO: 20382 - RNA, 21 nt, synthetic construct
  source 1..21: mol_type = other RNA; note = Description of Artificial Sequence: Synthetic oligonucleotide
acgacttcactaactgtgatt

SEQ ID NO: 20383 - RNA, 21 nt, synthetic construct
  source 1..21: mol_type = other RNA; note = Description of Artificial Sequence: Synthetic oligonucleotide
cgacttcactaactgtgaatt

SEQ ID NO: 20384 - RNA, 21 nt, synthetic construct
  source 1..21: mol_type = other RNA; note = Description of Artificial Sequence: Synthetic oligonucleotide
gacttcactaactgtgacatt

SEQ ID NO: 20385 - RNA, 21 nt, synthetic construct
  source 1..21: mol_type = other RNA; note = Description of Artificial Sequence: Synthetic oligonucleotide
acttcactaactgtgactatt

SEQ ID NO: 20386 - RNA, 21 nt, synthetic construct
  source 1..21: mol_type = other RNA; note = Description of Artificial Sequence: Synthetic oligonucleotide
cttcactaactgtgacttatt

SEQ ID NO: 20387 - RNA, 21 nt, synthetic construct
  source 1..21: mol_type = other RNA; note = Description of Artificial Sequence: Synthetic oligonucleotide
ttcactaactgtgactttatt

SEQ ID NO: 20388 - RNA, 21 nt, synthetic construct
  source 1..21: mol_type = other RNA; note = Description of Artificial Sequence: Synthetic oligonucleotide
tcactaactgtgactttgatt

SEQ ID NO: 20389 - RNA, 21 nt, synthetic construct
  source 1..21: mol_type = other RNA; note = Description of Artificial Sequence: Synthetic oligonucleotide
cactaactgtgactttgaatt

SEQ ID NO: 20390 - RNA, 21 nt, synthetic construct
  source 1..21: mol_type = other RNA; note = Description of Artificial Sequence: Synthetic oligonucleotide
actaactgtgactttgagatt

SEQ ID NO: 20391 - RNA, 21 nt, synthetic construct
  source 1..21: mol_type = other RNA; note = Description of Artificial Sequence: Synthetic oligonucleotide
ctaactgtgactttgagaatt

SEQ ID NO: 20392 - RNA, 21 nt, synthetic construct
  source 1..21: mol_type = other RNA; note = Description of Artificial Sequence: Synthetic oligonucleotide
taactgtgactttgagaaatt

SEQ ID NO: 20393 - RNA, 21 nt, synthetic construct
  source 1..21: mol_type = other RNA; note = Description of Artificial Sequence: Synthetic oligonucleotide
aactgtgactttgagaagatt

SEQ ID NO: 20394 - RNA, 21 nt, synthetic construct
  source 1..21: mol_type = other RNA; note = Description of Artificial Sequence: Synthetic oligonucleotide
actgtgactttgagaagaatt

SEQ ID NO: 20395 - RNA, 21 nt, synthetic construct
  source 1..21: mol_type = other RNA; note = Description of Artificial Sequence: Synthetic oligonucleotide
ctgtgactttgagaagatatt

SEQ ID NO: 20396 - RNA, 21 nt, synthetic construct
  source 1..21: mol_type = other RNA; note = Description of Artificial Sequence: Synthetic oligonucleotide
tgtgactttgagaagattatt

SEQ ID NO: 20397 - RNA, 21 nt, synthetic construct
  source 1..21: mol_type = other RNA; note = Description of Artificial Sequence: Synthetic oligonucleotide
gtgactttgagaagattaatt

SEQ ID NO: 20398 - RNA, 21 nt, synthetic construct
  source 1..21: mol_type = other RNA; note = Description of Artificial Sequence: Synthetic oligonucleotide
tgactttgagaagattaaatt

SEQ ID NO: 20399 - RNA, 21 nt, synthetic construct
  source 1..21: mol_type = other RNA; note = Description of Artificial Sequence: Synthetic oligonucleotide
gactttgagaagattaaaatt

SEQ ID NO: 20400 - RNA, 21 nt, synthetic construct
  source 1..21: mol_type = other RNA; note = Description of Artificial Sequence: Synthetic oligonucleotide
actttgagaagattaaagatt

SEQ ID NO: 20401 - RNA, 21 nt, synthetic construct
  source 1..21: mol_type = other RNA; note = Description of Artificial Sequence: Synthetic oligonucleotide
ctttgagaagattaaagcatt

SEQ ID NO: 20402 - RNA, 21 nt, synthetic construct
  source 1..21: mol_type = other RNA; note = Description of Artificial Sequence: Synthetic oligonucleotide
tttgagaagattaaagcaatt

SEQ ID NO: 20403 - RNA, 21 nt, synthetic construct
  source 1..21: mol_type = other RNA; note = Description of Artificial Sequence: Synthetic oligonucleotide
ttgagaagattaaagcagatt

SEQ ID NO: 20404 - RNA, 21 nt, synthetic construct
  source 1..21: mol_type = other RNA; note = Description of Artificial Sequence: Synthetic oligonucleotide
tgagaagattaaagcagcatt

SEQ ID NO: 20405 - RNA, 21 nt, synthetic construct
  source 1..21: mol_type = other RNA; note = Description of Artificial Sequence: Synthetic oligonucleotide
gagaagattaaagcagccatt

SEQ ID NO: 20406 - RNA, 21 nt, synthetic construct
  source 1..21: mol_type = other RNA; note = Description of Artificial Sequence: Synthetic oligonucleotide
agaagattaaagcagcctatt

SEQ ID NO: 20407 - RNA, 21 nt, synthetic construct
  source 1..21: mol_type = other RNA; note = Description of Artificial Sequence: Synthetic oligonucleotide
gaagattaaagcagcctaatt

SEQ ID NO: 20408 - RNA, 21 nt, synthetic construct
  source 1..21: mol_type = other RNA; note = Description of Artificial Sequence: Synthetic oligonucleotide
aagattaaagcagcctatatt

SEQ ID NO: 20409 - RNA, 21 nt, synthetic construct
  source 1..21: mol_type = other RNA; note = Description of Artificial Sequence: Synthetic oligonucleotide
agattaaagcagcctatcatt

SEQ ID NO: 20410 - RNA, 21 nt, synthetic construct
  source 1..21: mol_type = other RNA; note = Description of Artificial Sequence: Synthetic oligonucleotide
gattaaagcagcctatctatt

SEQ ID NO: 20411 - RNA, 21 nt, synthetic construct
  source 1..21: mol_type = other RNA; note = Description of Artificial Sequence: Synthetic oligonucleotide
attaaagcagcctatctcatt

SEQ ID NO: 20412 - RNA, 21 nt, synthetic construct
  source 1..21: mol_type = other RNA; note = Description of Artificial Sequence: Synthetic oligonucleotide
ttaaagcagcctatctcaatt

SEQ ID NO: 20413 - RNA, 21 nt, synthetic construct
  source 1..21: mol_type = other RNA; note = Description of Artificial Sequence: Synthetic oligonucleotide
taaagcagcctatctcagatt

SEQ ID NO: 20414 - RNA, 21 nt, synthetic construct
  source 1..21: mol_type = other RNA; note = Description of Artificial Sequence: Synthetic oligonucleotide
aaagcagcctatctcagtatt

SEQ ID NO: 20415 - RNA, 21 nt, synthetic construct
  source 1..21: mol_type = other RNA; note = Description of Artificial Sequence: Synthetic oligonucleotide
aagcagcctatctcagtaatt

SEQ ID NO: 20416 - RNA, 21 nt, synthetic construct
  source 1..21: mol_type = other RNA; note = Description of Artificial Sequence: Synthetic oligonucleotide
agcagcctatctcagtacatt

SEQ ID NO: 20417 - RNA, 21 nt, synthetic construct
  source 1..21: mol_type = other RNA; note = Description of Artificial Sequence: Synthetic oligonucleotide
gcagcctatctcagtactatt

SEQ ID NO: 20418 - RNA, 21 nt, synthetic construct
  source 1..21: mol_type = other RNA; note = Description of Artificial Sequence: Synthetic oligonucleotide
cagcctatctcagtactaatt

SEQ ID NO: 20419 - RNA, 21 nt, synthetic construct
  source 1..21: mol_type = other RNA; note = Description of Artificial Sequence: Synthetic oligonucleotide
agcctatctcagtactatatt

SEQ ID NO: 20420 - RNA, 21 nt, synthetic construct
  source 1..21: mol_type = other RNA; note = Description of Artificial Sequence: Synthetic oligonucleotide
gcctatctcagtactattatt

SEQ ID NO: 20421 - RNA, 21 nt, synthetic construct
  source 1..21: mol_type = other RNA; note = Description of Artificial Sequence: Synthetic oligonucleotide
cctatctcagtactatttatt

SEQ ID NO: 20422 - RNA, 21 nt, synthetic construct
  source 1..21: mol_type = other RNA; note = Description of Artificial Sequence: Synthetic oligonucleotide
ctatctcagtactatttcatt

SEQ ID NO: 20423 - RNA, 21 nt, synthetic construct
  source 1..21: mol_type = other RNA; note = Description of Artificial Sequence: Synthetic oligonucleotide
tatctcagtactatttctatt

SEQ ID NO: 20424 - RNA, 21 nt, synthetic construct
  source 1..21: mol_type = other RNA; note = Description of Artificial Sequence: Synthetic oligonucleotide
atctcagtactatttctaatt

SEQ ID NO: 20425 - RNA, 21 nt, synthetic construct
  source 1..21: mol_type = other RNA; note = Description of Artificial Sequence: Synthetic oligonucleotide
tctcagtactatttctaaatt

SEQ ID NO: 20426 - RNA, 21 nt, synthetic construct
  source 1..21: mol_type = other RNA; note = Description of Artificial Sequence: Synthetic oligonucleotide
ctcagtactatttctaaaatt

SEQ ID NO: 20427 - RNA, 21 nt, synthetic construct
  source 1..21: mol_type = other RNA; note = Description of Artificial Sequence: Synthetic oligonucleotide
tcagtactatttctaaagatt

SEQ ID NO: 20428 - RNA, 21 nt, synthetic construct
  source 1..21: mol_type = other RNA; note = Description of Artificial Sequence: Synthetic oligonucleotide
cagtactatttctaaagaatt

SEQ ID NO: 20429 - RNA, 21 nt, synthetic construct
  source 1..21: mol_type = other RNA; note = Description of Artificial Sequence: Synthetic oligonucleotide
agtactatttctaaagacatt

SEQ ID NO: 20430 - RNA, 21 nt, synthetic construct
  source 1..21: mol_type = other RNA; note = Description of Artificial Sequence: Synthetic oligonucleotide
gtactatttctaaagaccatt

SEQ ID NO: 20431 - RNA, 21 nt, synthetic construct
  source 1..21: mol_type = other RNA; note = Description of Artificial Sequence: Synthetic oligonucleotide
tactatttctaaagacctatt

SEQ ID NO: 20432 - RNA, 21 nt, synthetic construct
  source 1..21: mol_type = other RNA; note = Description of Artificial Sequence: Synthetic oligonucleotide
actatttctaaagacctgatt

SEQ ID NO: 20433 - RNA, 21 nt, synthetic construct
  source 1..21: mol_type = other RNA; note = Description of Artificial Sequence: Synthetic oligonucleotide
ctatttctaaagacctgaatt

SEQ ID NO: 20434 - RNA, 21 nt, synthetic construct
  source 1..21: mol_type = other RNA; note = Description of Artificial Sequence: Synthetic oligonucleotide
tatttctaaagacctgatatt

SEQ ID NO: 20435 - RNA, 21 nt, synthetic construct
  source 1..21: mol_type = other RNA; note = Description of Artificial Sequence: Synthetic oligonucleotide
atttctaaagacctgattatt

SEQ ID NO: 20436 - RNA, 21 nt, synthetic construct
  source 1..21: mol_type = other RNA; note = Description of Artificial Sequence: Synthetic oligonucleotide
tttctaaagacctgattaatt

SEQ ID NO: 20437 - RNA, 21 nt, synthetic construct
  source 1..21: mol_type = other RNA; note = Description of Artificial Sequence: Synthetic oligonucleotide
ttctaaagacctgattacatt

SEQ ID NO: 20438 - RNA, 21 nt, synthetic construct
  source 1..21: mol_type = other RNA; note = Description of Artificial Sequence: Synthetic oligonucleotide
tctaaagacctgattacaatt

SEQ ID NO: 20439 - RNA, 21 nt, synthetic construct
  source 1..21: mol_type = other RNA; note = Description of Artificial Sequence: Synthetic oligonucleotide
ctaaagacctgattacatatt

SEQ ID NO: 20440 - RNA, 21 nt, synthetic construct
  source 1..21: mol_type = other RNA; note = Description of Artificial Sequence: Synthetic oligonucleotide
taaagacctgattacataatt

SEQ ID NO: 20441 - RNA, 21 nt, synthetic construct
  source 1..21: mol_type = other RNA; note = Description of Artificial Sequence: Synthetic oligonucleotide
aaagacctgattacatatatt

SEQ ID NO: 20442 - RNA, 21 nt, synthetic construct
  source 1..21: mol_type = other RNA; note = Description of Artificial Sequence: Synthetic oligonucleotide
aagacctgattacatataatt

SEQ ID NO: 20443 - RNA, 21 nt, synthetic construct
  source 1..21: mol_type = other RNA; note = Description of Artificial Sequence: Synthetic oligonucleotide
agacctgattacatatatatt

SEQ ID NO: 20444 - RNA, 21 nt, synthetic construct
  source 1..21: mol_type = other RNA; note = Description of Artificial Sequence: Synthetic oligonucleotide
gacctgattacatatatgatt

SEQ ID NO: 20445 - RNA, 21 nt, synthetic construct
  source 1..21: mol_type = other RNA; note = Description of Artificial Sequence: Synthetic oligonucleotide
acctgattacatatatgaatt

SEQ ID NO: 20446 - RNA, 21 nt, synthetic construct
  source 1..21: mol_type = other RNA; note = Description of Artificial Sequence: Synthetic oligonucleotide
cctgattacatatatgagatt

SEQ ID NO: 20447 - RNA, 21 nt, synthetic construct
  source 1..21: mol_type = other RNA; note = Description of Artificial Sequence: Synthetic oligonucleotide
ctgattacatatatgagtatt

SEQ ID NO: 20448 - RNA, 21 nt, synthetic construct
  source 1..21: mol_type = other RNA; note = Description of Artificial Sequence: Synthetic oligonucleotide
tgattacatatatgagtgatt

SEQ ID NO: 20449 - RNA, 21 nt, synthetic construct
  source 1..21: mol_type = other RNA; note = Description of Artificial Sequence: Synthetic oligonucleotide
gattacatatatgagtggatt

SEQ ID NO: 20450 - RNA, 21 nt, synthetic construct
  source 1..21: mol_type = other RNA; note = Description of Artificial Sequence: Synthetic oligonucleotide
attacatatatgagtgggatt

SEQ ID NO: 20451 - RNA, 21 nt, synthetic construct
  source 1..21: mol_type = other RNA; note = Description of Artificial Sequence: Synthetic oligonucleotide
ttacatatatgagtgggaatt

SEQ ID NO: 20452 - RNA, 21 nt, synthetic construct
  source 1..21: mol_type = other RNA; note = Description of Artificial Sequence: Synthetic oligonucleotide
tacatatatgagtgggacatt

SEQ ID NO: 20453 - RNA, 21 nt, synthetic construct
  source 1..21: mol_type = other RNA; note = Description of Artificial Sequence: Synthetic oligonucleotide
acatatatgagtgggaccatt

SEQ ID NO: 20454 - RNA, 21 nt, synthetic construct
  source 1..21: mol_type = other RNA; note = Description of Artificial Sequence: Synthetic oligonucleotide
catatatgagtgggaccaatt

SEQ ID NO: 20455 - RNA, 21 nt, synthetic construct
  source 1..21: mol_type = other RNA; note = Description of Artificial Sequence: Synthetic oligonucleotide
atatatgagtgggaccaaatt

SEQ ID NO: 20456 - RNA, 21 nt, synthetic construct
  source 1..21: mol_type = other RNA; note = Description of Artificial Sequence: Synthetic oligonucleotide
tatatgagtgggaccaaaatt

SEQ ID NO: 20457 - RNA, 21 nt, synthetic construct
  source 1..21: mol_type = other RNA; note = Description of Artificial Sequence: Synthetic oligonucleotide
atatgagtgggaccaaaaatt

SEQ ID NO: 20458 - RNA, 21 nt, synthetic construct
  source 1..21: mol_type = other RNA; note = Description of Artificial Sequence: Synthetic oligonucleotide
tatgagtgggaccaaaagatt

SEQ ID NO: 20459 - RNA, 21 nt, synthetic construct
  source 1..21: mol_type = other RNA; note = Description of Artificial Sequence: Synthetic oligonucleotide
atgagtgggaccaaaagtatt

SEQ ID NO: 20460 - RNA, 21 nt, synthetic construct
  source 1..21: mol_type = other RNA; note = Description of Artificial Sequence: Synthetic oligonucleotide
tgagtgggaccaaaagtaatt

SEQ ID NO: 20461 - RNA, 21 nt, synthetic construct
  source 1..21: mol_type = other RNA; note = Description of Artificial Sequence: Synthetic oligonucleotide
gagtgggaccaaaagtacatt

SEQ ID NO: 20462 - RNA, 21 nt, synthetic construct
  source 1..21: mol_type = other RNA; note = Description of Artificial Sequence: Synthetic oligonucleotide
agtgggaccaaaagtaccatt

SEQ ID NO: 20463 - RNA, 21 nt, synthetic construct
  source 1..21: mol_type = other RNA; note = Description of Artificial Sequence: Synthetic oligonucleotide
gtgggaccaaaagtaccgatt

SEQ ID NO: 20464 - RNA, 21 nt, synthetic construct
  source 1..21: mol_type = other RNA; note = Description of Artificial Sequence: Synthetic oligonucleotide
tgggaccaaaagtaccgaatt

SEQ ID NO: 20465 - RNA, 21 nt, synthetic construct
  source 1..21: mol_type = other RNA; note = Description of Artificial Sequence: Synthetic oligonucleotide
gggaccaaaagtaccgagatt

SEQ ID NO: 20466 - RNA, 21 nt, synthetic construct
  source 1..21: mol_type = other RNA; note = Description of Artificial Sequence: Synthetic oligonucleotide
ggaccaaaagtaccgagtatt

SEQ ID NO: 20467 - RNA, 21 nt, synthetic construct
  source 1..21: mol_type = other RNA; note = Description of Artificial Sequence: Synthetic oligonucleotide
gaccaaaagtaccgagttatt

SEQ ID NO: 20468 - RNA, 21 nt, synthetic construct
  source 1..21: mol_type = other RNA; note = Description of Artificial Sequence: Synthetic oligonucleotide
accaaaagtaccgagttcatt

SEQ ID NO: 20469 - RNA, 21 nt, synthetic construct
  source 1..21: mol_type = other RNA; note = Description of Artificial Sequence: Synthetic oligonucleotide
ccaaaagtaccgagttcaatt

SEQ ID NO: 20470 - RNA, 21 nt, synthetic construct
  source 1..21: mol_type = other RNA; note = Description of Artificial Sequence: Synthetic oligonucleotide
caaaagtaccgagttcaaatt

SEQ ID NO: 20471 - RNA, 21 nt, synthetic construct
  source 1..21: mol_type = other RNA; note = Description of Artificial Sequence: Synthetic oligonucleotide
aaaagtaccgagttcaacatt

SEQ ID NO: 20472 - RNA, 21 nt, synthetic construct
  source 1..21: mol_type = other RNA; note = Description of Artificial Sequence: Synthetic oligonucleotide
aaagtaccgagttcaacaatt

SEQ ID NO: 20473 - RNA, 21 nt, synthetic construct
  source 1..21: mol_type = other RNA; note = Description of Artificial Sequence: Synthetic oligonucleotide
aagtaccgagttcaacaaatt

SEQ ID NO: 20474 - RNA, 21 nt, synthetic construct
  source 1..21: mol_type = other RNA; note = Description of Artificial Sequence: Synthetic oligonucleotide
agtaccgagttcaacaacatt

SEQ ID NO: 20475 - RNA, 21 nt, synthetic construct
  source 1..21: mol_type = other RNA; note = Description of Artificial Sequence: Synthetic oligonucleotide
gtaccgagttcaacaacaatt

SEQ ID NO: 20476 - RNA, 21 nt, synthetic construct
  source 1..21: mol_type = other RNA; note = Description of Artificial Sequence: Synthetic oligonucleotide
taccgagttcaacaacacatt

SEQ ID NO: 20477 - RNA, 21 nt, synthetic construct
  source 1..21: mol_type = other RNA; note = Description of Artificial Sequence: Synthetic oligonucleotide
accgagttcaacaacaccatt

SEQ ID NO: 20478 - RNA, 21 nt, synthetic construct
  source 1..21: mol_type = other RNA; note = Description of Artificial Sequence: Synthetic oligonucleotide
ccgagttcaacaacaccgatt

SEQ ID NO: 20479 - RNA, 21 nt, synthetic construct
  source 1..21: mol_type = other RNA; note = Description of Artificial Sequence: Synthetic oligonucleotide
cgagttcaacaacaccgtatt

SEQ ID NO: 20480 - RNA, 21 nt, synthetic construct
  source 1..21: mol_type = other RNA; note = Description of Artificial Sequence: Synthetic oligonucleotide
gagttcaacaacaccgtcatt

SEQ ID NO: 20481 - RNA, 21 nt, synthetic construct
  source 1..21: mol_type = other RNA; note = Description of Artificial Sequence: Synthetic oligonucleotide
agttcaacaacaccgtctatt

SEQ ID NO: 20482 - RNA, 21 nt, synthetic construct
  source 1..21: mol_type = other RNA; note = Description of Artificial Sequence: Synthetic oligonucleotide
gttcaacaacaccgtctcatt

SEQ ID NO: 20483 - RNA, 21 nt, synthetic construct
  source 1..21: mol_type = other RNA; note = Description of Artificial Sequence: Synthetic oligonucleotide
ttcaacaacaccgtctctatt

SEQ ID NO: 20484 - RNA, 21 nt, synthetic construct
  source 1..21: mol_type = other RNA; note = Description of Artificial Sequence: Synthetic oligonucleotide
tcaacaacaccgtctcttatt

SEQ ID NO: 20485 - RNA, 21 nt, synthetic construct
  source 1..21: mol_type = other RNA; note = Description of Artificial Sequence: Synthetic oligonucleotide
caacaacaccgtctcttgatt

SEQ ID NO: 20486 - RNA, 21 nt, synthetic construct
  source 1..21: mol_type = other RNA; note = Description of Artificial Sequence: Synthetic oligonucleotide
aacaacaccgtctcttgtatt

SEQ ID NO: 20487 - RNA, 21 nt, synthetic construct
  source 1..21: mol_type = other RNA; note = Description of Artificial Sequence: Synthetic oligonucleotide
acaacaccgtctcttgtaatt

SEQ ID NO: 20488 - RNA, 21 nt, synthetic construct
  source 1..21: mol_type = other RNA; note = Description of Artificial Sequence: Synthetic oligonucleotide
caacaccgtctcttgtagatt

SEQ ID NO: 20489 - RNA, 21 nt, synthetic construct
  source 1..21: mol_type = other RNA; note = Description of Artificial Sequence: Synthetic oligonucleotide
aacaccgtctcttgtagcatt

SEQ ID NO: 20490 - RNA, 21 nt, synthetic construct
  source 1..21: mol_type = other RNA; note = Description of Artificial Sequence: Synthetic oligonucleotide
acaccgtctcttgtagcaatt

SEQ ID NO: 20491 - RNA, 21 nt, synthetic construct
  source 1..21: mol_type = other RNA; note = Description of Artificial Sequence: Synthetic oligonucleotide
caccgtctcttgtagcaaatt

SEQ ID NO: 20492 - RNA, 21 nt, synthetic construct
  source 1..21: mol_type = other RNA; note = Description of Artificial Sequence: Synthetic oligonucleotide
accgtctcttgtagcaatatt

SEQ ID NO: 20493 - RNA, 21 nt, synthetic construct
  source 1..21: mol_type = other RNA; note = Description of Artificial Sequence: Synthetic oligonucleotide
ccgtctcttgtagcaatcatt

SEQ ID NO: 20494 - RNA, 21 nt, synthetic construct
  source 1..21: mol_type = other RNA; note = Description of Artificial Sequence: Synthetic oligonucleotide
cgtctcttgtagcaatcgatt

SEQ ID NO: 20495 - RNA, 21 nt, synthetic construct
  source 1..21: mol_type = other RNA; note = Description of Artificial Sequence: Synthetic oligonucleotide
gtctcttgtagcaatcggatt

SEQ ID NO: 20496 - RNA, 21 nt, synthetic construct
  source 1..21: mol_type = other RNA; note = Description of Artificial Sequence: Synthetic oligonucleotide
tctcttgtagcaatcggcatt

SEQ ID NO: 20497 - RNA, 21 nt, synthetic construct
  source 1..21: mol_type = other RNA; note = Description of Artificial Sequence: Synthetic oligonucleotide
ctcttgtagcaatcggccatt

SEQ ID NO: 20498 - RNA, 21 nt, synthetic construct
  source 1..21: mol_type = other RNA; note = Description of Artificial Sequence: Synthetic oligonucleotide
tcttgtagcaatcggccaatt

SEQ ID NO: 20499 - RNA, 21 nt, synthetic construct
  source 1..21: mol_type = other RNA; note = Description of Artificial Sequence: Synthetic oligonucleotide
cttgtagcaatcggccacatt

SEQ ID NO: 20500 - RNA, 21 nt, synthetic construct
  source 1..21: mol_type = other RNA; note = Description of Artificial Sequence: Synthetic oligonucleotide
ttgtagcaatcggccacaatt

SEQ ID NO: 20501 - RNA, 21 nt, synthetic construct
  source 1..21: mol_type = other RNA; note = Description of Artificial Sequence: Synthetic oligonucleotide
tgtagcaatcggccacatatt

SEQ ID NO: 20502 - RNA, 21 nt, synthetic construct
  source 1..21: mol_type = other RNA; note = Description of Artificial Sequence: Synthetic oligonucleotide
gtagcaatcggccacattatt

SEQ ID NO: 20503 - RNA, 21 nt, synthetic construct
  source 1..21: mol_type = other RNA; note = Description of Artificial Sequence: Synthetic oligonucleotide
tagcaatcggccacattgatt

SEQ ID NO: 20504 - RNA, 21 nt, synthetic construct
  source 1..21: mol_type = other RNA; note = Description of Artificial Sequence: Synthetic oligonucleotide
agcaatcggccacattgcatt

SEQ ID NO: 20505 - RNA, 21 nt, synthetic construct
  source 1..21: mol_type = other RNA; note = Description of Artificial Sequence: Synthetic oligonucleotide
gcaatcggccacattgccatt

SEQ ID NO: 20506 - RNA, 21 nt, synthetic construct
  source 1..21: mol_type = other RNA; note = Description of Artificial Sequence: Synthetic oligonucleotide
caatcggccacattgcctatt

SEQ ID NO: 20507 - RNA, 21 nt, synthetic construct
  source 1..21: mol_type = other RNA; note = Description of Artificial Sequence: Synthetic oligonucleotide
aatcggccacattgccttatt

SEQ ID NO: 20508 - RNA, 21 nt, synthetic construct
  source 1..21: mol_type = other RNA; note = Description of Artificial Sequence: Synthetic oligonucleotide
atcggccacattgccttaatt

SEQ ID NO: 20509 - RNA, 21 nt, synthetic construct
  source 1..21: mol_type = other RNA; note = Description of Artificial Sequence: Synthetic oligonucleotide
tcggccacattgccttacatt

SEQ ID NO: 20510 - RNA, 21 nt, synthetic construct
  source 1..21: mol_type = other RNA; note = Description of Artificial Sequence: Synthetic oligonucleotide
cggccacattgccttactatt

SEQ ID NO: 20511 - RNA, 21 nt, synthetic construct
  source 1..21: mol_type = other RNA; note = Description of Artificial Sequence: Synthetic oligonucleotide
ggccacattgccttactgatt

SEQ ID NO: 20512 - RNA, 21 nt, synthetic construct
  source 1..21: mol_type = other RNA; note = Description of Artificial Sequence: Synthetic oligonucleotide
gccacattgccttactgaatt

SEQ ID NO: 20513 - RNA, 21 nt, synthetic construct
  source 1..21: mol_type = other RNA; note = Description of Artificial Sequence: Synthetic oligonucleotide
ccacattgccttactgaaatt

SEQ ID NO: 20514 - RNA, 21 nt, synthetic construct
  source 1..21: mol_type = other RNA; note = Description of Artificial Sequence: Synthetic oligonucleotide
cacattgccttactgaaaatt

SEQ ID NO: 20515 - RNA, 21 nt, synthetic construct
  source 1..21: mol_type = other RNA; note = Description of Artificial Sequence: Synthetic oligonucleotide
acattgccttactgaaatatt

SEQ ID NO: 20516 - RNA, 21 nt, synthetic construct
  source 1..21: mol_type = other RNA; note = Description of Artificial Sequence: Synthetic oligonucleotide
cattgccttactgaaatcatt

SEQ ID NO: 20517 - RNA, 21 nt, synthetic construct
  source 1..21: mol_type = other RNA; note = Description of Artificial Sequence: Synthetic oligonucleotide
attgccttactgaaatccatt

SEQ ID NO: 20518 - RNA, 21 nt, synthetic construct
  source 1..21: mol_type = other RNA; note = Description of Artificial Sequence: Synthetic oligonucleotide
ttgccttactgaaatccaatt

SEQ ID NO: 20519 - RNA, 21 nt, synthetic construct
  source 1..21: mol_type = other RNA; note = Description of Artificial Sequence: Synthetic oligonucleotide
tgccttactgaaatccagatt

SEQ ID NO: 20520 - RNA, 21 nt, synthetic construct
  source 1..21: mol_type = other RNA; note = Description of Artificial Sequence: Synthetic oligonucleotide
gccttactgaaatccagaatt

SEQ ID NO: 20521 - RNA, 21 nt, synthetic construct
  source 1..21: mol_type = other RNA; note = Description of Artificial Sequence: Synthetic oligonucleotide
ccttactgaaatccagagatt

SEQ ID NO: 20522 - RNA, 21 nt, synthetic construct
  source 1..21: mol_type = other RNA; note = Description of Artificial Sequence: Synthetic oligonucleotide
cttactgaaatccagagcatt

SEQ ID NO: 20523 - RNA, 21 nt, synthetic construct
  source 1..21: mol_type = other RNA; note = Description of Artificial Sequence: Synthetic oligonucleotide
ttactgaaatccagagccatt

SEQ ID NO: 20524 - RNA, 21 nt, synthetic construct
  source 1..21: mol_type = other RNA; note = Description of Artificial Sequence: Synthetic oligonucleotide
tactgaaatccagagcctatt

SEQ ID NO: 20525 - RNA, 21 nt, synthetic construct
  source 1..21: mol_type = other RNA; note = Description of Artificial Sequence: Synthetic oligonucleotide
actgaaatccagagcctaatt

SEQ ID NO: 20526 - RNA, 21 nt, synthetic construct
  source 1..21: mol_type = other RNA; note = Description of Artificial Sequence: Synthetic oligonucleotide
ctgaaatccagagcctaaatt

SEQ ID NO: 20527 - RNA, 21 nt, synthetic construct
  source 1..21: mol_type = other RNA; note = Description of Artificial Sequence: Synthetic oligonucleotide
tgaaatccagagcctaacatt

SEQ ID NO: 20528 - RNA, 21 nt, synthetic construct
  source 1..21: mol_type = other RNA; note = Description of Artificial Sequence: Synthetic oligonucleotide
gaaatccagagcctaaccatt

SEQ ID NO: 20529 - RNA, 21 nt, synthetic construct
  source 1..21: mol_type = other RNA; note = Description of Artificial Sequence: Synthetic oligonucleotide
aaatccagagcctaacctatt

SEQ ID NO: 20530 - RNA, 21 nt, synthetic construct
  source 1..21: mol_type = other RNA; note = Description of Artificial Sequence: Synthetic oligonucleotide
aatccagagcctaaccttatt

SEQ ID NO: 20531 - RNA, 21 nt, synthetic construct
  source 1..21: mol_type = other RNA; note = Description of Artificial Sequence: Synthetic oligonucleotide
atccagagcctaaccttcatt

SEQ ID NO: 20532 - RNA, 21 nt, synthetic construct
  source 1..21: mol_type = other RNA; note = Description of Artificial Sequence: Synthetic oligonucleotide
tccagagcctaaccttcaatt

SEQ ID NO: 20533 - RNA, 21 nt, synthetic construct
  source 1..21: mol_type = other RNA; note = Description of Artificial Sequence: Synthetic oligonucleotide
ccagagcctaaccttcaaatt

SEQ ID NO: 20534 - RNA, 21 nt, synthetic construct
  source 1..21: mol_type = other RNA; note = Description of Artificial Sequence: Synthetic oligonucleotide
cagagcctaaccttcaatatt

SEQ ID NO: 20535 - RNA, 21 nt, synthetic construct
  source 1..21: mol_type = other RNA; note = Description of Artificial Sequence: Synthetic oligonucleotide
agagcctaaccttcaatcatt

SEQ ID NO: 20536 - RNA, 21 nt, synthetic construct
  source 1..21: mol_type = other RNA; note = Description of Artificial Sequence: Synthetic oligonucleotide
gagcctaaccttcaatccatt

SEQ ID NO: 20537 - RNA, 21 nt, synthetic construct
  source 1..21: mol_type = other RNA; note = Description of Artificial Sequence: Synthetic oligonucleotide
agcctaaccttcaatcccatt

SEQ ID NO: 20538 - RNA, 21 nt, synthetic construct
  source 1..21: mol_type = other RNA; note = Description of Artificial Sequence: Synthetic oligonucleotide
gcctaaccttcaatcccaatt

SEQ ID NO: 20539 - RNA, 21 nt, synthetic construct
  source 1..21: mol_type = other RNA; note = Description of Artificial Sequence: Synthetic oligonucleotide
cctaaccttcaatcccacatt

SEQ ID NO: 20540 - RNA, 21 nt, synthetic construct
  source 1..21: mol_type = other RNA; note = Description of Artificial Sequence: Synthetic oligonucleotide
ctaaccttcaatcccaccatt

SEQ ID NO: 20541 - RNA, 21 nt, synthetic construct
  source 1..21: mol_type = other RNA; note = Description of Artificial Sequence: Synthetic oligonucleotide
taaccttcaatcccaccgatt

SEQ ID NO: 20542 - RNA, 21 nt, synthetic construct
  source 1..21: mol_type = other RNA; note = Description of Artificial Sequence: Synthetic oligonucleotide
aaccttcaatcccaccgcatt

SEQ ID NO: 20543 - RNA, 21 nt, synthetic construct
  source 1..21: mol_type = other RNA; note = Description of Artificial Sequence: Synthetic oligonucleotide
accttcaatcccaccgccatt

SEQ ID NO: 20544 - RNA, 21 nt, synthetic construct
  source 1..21: mol_type = other RNA; note = Description of Artificial Sequence: Synthetic oligonucleotide
ccttcaatcccaccgccgatt

SEQ ID NO: 20545 - RNA, 21 nt, synthetic construct
  source 1..21: mol_type = other RNA; note = Description of Artificial Sequence: Synthetic oligonucleotide
cttcaatcccaccgccggatt

SEQ ID NO: 20546 - RNA, 21 nt, synthetic construct
  source 1..21: mol_type = other RNA; note = Description of Artificial Sequence: Synthetic oligonucleotide
ttcaatcccaccgccggcatt

SEQ ID NO: 20547 - RNA, 21 nt, synthetic construct
  source 1..21: mol_type = other RNA; note = Description of Artificial Sequence: Synthetic oligonucleotide
tcaatcccaccgccggctatt

SEQ ID NO: 20548 - RNA, 21 nt, synthetic construct
  source 1..21: mol_type = other RNA; note = Description of Artificial Sequence: Synthetic oligonucleotide
caatcccaccgccggctgatt

SEQ ID NO: 20549 - RNA, 21 nt, synthetic construct
  source 1..21: mol_type = other RNA; note = Description of Artificial Sequence: Synthetic oligonucleotide
aatcccaccgccggctgcatt

SEQ ID NO: 20550 - RNA, 21 nt, synthetic construct
  source 1..21: mol_type = other RNA; note = Description of Artificial Sequence: Synthetic oligonucleotide
atcccaccgccggctgcgatt

SEQ ID NO: 20551 - RNA, 21 nt, synthetic construct
  source 1..21: mol_type = other RNA; note = Description of Artificial Sequence: Synthetic oligonucleotide
tcccaccgccggctgcgcatt

SEQ ID NO: 20552 - RNA, 21 nt, synthetic construct
  source 1..21: mol_type = other RNA; note = Description of Artificial Sequence: Synthetic oligonucleotide
cccaccgccggctgcgcgatt

SEQ ID NO: 20553 - RNA, 21 nt, synthetic construct
  source 1..21: mol_type = other RNA; note = Description of Artificial Sequence: Synthetic oligonucleotide
ccaccgccggctgcgcgtatt

SEQ ID NO: 20554 - RNA, 21 nt, synthetic construct
  source 1..21: mol_type = other RNA; note = Description of Artificial Sequence: Synthetic oligonucleotide
caccgccggctgcgcgtcatt

SEQ ID NO: 20555 - RNA, 21 nt, synthetic construct
  source 1..21: mol_type = other RNA; note = Description of Artificial Sequence: Synthetic oligonucleotide
accgccggctgcgcgtcgatt

SEQ ID NO: 20556 - RNA, 21 nt, synthetic construct
  source 1..21: mol_type = other RNA; note = Description of Artificial Sequence: Synthetic oligonucleotide
ccgccggctgcgcgtcgcatt

SEQ ID NO: 20557 - RNA, 21 nt, synthetic construct
  source 1..21: mol_type = other RNA; note = Description of Artificial Sequence: Synthetic oligonucleotide
cgccggctgcgcgtcgctatt

SEQ ID NO: 20558 - RNA, 21 nt, synthetic construct
  source 1..21: mol_type = other RNA; note = Description of Artificial Sequence: Synthetic oligonucleotide
gccggctgcgcgtcgctcatt

SEQ ID NO: 20559 - RNA, 21 nt, synthetic construct
  source 1..21: mol_type = other RNA; note = Description of Artificial Sequence: Synthetic oligonucleotide
ccggctgcgcgtcgctcgatt

SEQ ID NO: 20560 - RNA, 21 nt, synthetic construct
  source 1..21: mol_type = other RNA; note = Description of Artificial Sequence: Synthetic oligonucleotide
cggctgcgcgtcgctcgcatt

SEQ ID NO: 20561 - RNA, 21 nt, synthetic construct
  source 1..21: mol_type = other RNA; note = Description of Artificial Sequence: Synthetic oligonucleotide
ggctgcgcgtcgctcgccatt

SEQ ID NO: 20562 - RNA, 21 nt, synthetic construct
  source 1..21: mol_type = other RNA; note = Description of Artificial Sequence: Synthetic oligonucleotide
gctgcgcgtcgctcgccaatt

SEQ ID NO: 20563 - RNA, 21 nt, synthetic construct
  source 1..21: mol_type = other RNA; note = Description of Artificial Sequence: Synthetic oligonucleotide
ctgcgcgtcgctcgccaaatt

SEQ ID NO: 20564 - RNA, 21 nt, synthetic construct
  source 1..21: mol_type = other RNA; note = Description of Artificial Sequence: Synthetic oligonucleotide
tgcgcgtcgctcgccaaaatt

SEQ ID NO: 20565 - RNA, 21 nt, synthetic construct
  source 1..21: mol_type = other RNA; note = Description of Artificial Sequence: Synthetic oligonucleotide
gcgcgtcgctcgccaaagatt

SEQ ID NO: 20566 - RNA, 21 nt, synthetic construct
  source 1..21: mol_type = other RNA; note = Description of Artificial Sequence: Synthetic oligonucleotide
cgcgtcgctcgccaaagaatt

SEQ ID NO: 20567 - RNA, 21 nt, synthetic construct
  source 1..21: mol_type = other RNA; note = Description of Artificial Sequence: Synthetic oligonucleotide
gcgtcgctcgccaaagaaatt

SEQ ID NO: 20568 - RNA, 21 nt, synthetic construct
  source 1..21: mol_type = other RNA; note = Description of Artificial Sequence: Synthetic oligonucleotide
cgtcgctcgccaaagaaaatt

SEQ ID NO: 20569 - RNA, 21 nt, synthetic construct
  source 1..21: mol_type = other RNA; note = Description of Artificial Sequence: Synthetic oligonucleotide
gtcgctcgccaaagaaatatt

SEQ ID NO: 20570 - RNA, 21 nt, synthetic construct
  source 1..21: mol_type = other RNA; note = Description of Artificial Sequence: Synthetic oligonucleotide
tcgctcgccaaagaaatgatt

SEQ ID NO: 20571 - RNA, 21 nt, synthetic construct
  source 1..21: mol_type = other RNA; note = Description of Artificial Sequence: Synthetic oligonucleotide
cgctcgccaaagaaatgtatt

SEQ ID NO: 20572 - RNA, 21 nt, synthetic construct
  source 1..21: mol_type = other RNA; note = Description of Artificial Sequence: Synthetic oligonucleotide
gctcgccaaagaaatgttatt

SEQ ID NO: 20573 - RNA, 21 nt, synthetic construct
  source 1..21: mol_type = other RNA; note = Description of Artificial Sequence: Synthetic oligonucleotide
ctcgccaaagaaatgttcatt

SEQ ID NO: 20574 - RNA, 21 nt, synthetic construct
  source 1..21: mol_type = other RNA; note = Description of Artificial Sequence: Synthetic oligonucleotide
tcgccaaagaaatgttcgatt

SEQ ID NO: 20575 - RNA, 21 nt, synthetic construct
  source 1..21: mol_type = other RNA; note = Description of Artificial Sequence: Synthetic oligonucleotide
cgccaaagaaatgttcgcatt

SEQ ID NO: 20576 - RNA, 21 nt, synthetic construct
  source 1..21: mol_type = other RNA; note = Description of Artificial Sequence: Synthetic oligonucleotide
gccaaagaaatgttcgccatt

SEQ ID NO: 20577 - RNA, 21 nt, synthetic construct
  source 1..21: mol_type = other RNA; note = Description of Artificial Sequence: Synthetic oligonucleotide
ccaaagaaatgttcgccaatt

SEQ ID NO: 20578 - RNA, 21 nt, synthetic construct
  source 1..21: mol_type = other RNA; note = Description of Artificial Sequence: Synthetic oligonucleotide
caaagaaatgttcgccatatt

SEQ ID NO: 20579 - RNA, 21 nt, synthetic construct
  source 1..21: mol_type = other RNA; note = Description of Artificial Sequence: Synthetic oligonucleotide
aaagaaatgttcgccatgatt

SEQ ID NO: 20580 - RNA, 21 nt, synthetic construct
  source 1..21: mol_type = other RNA; note = Description of Artificial Sequence: Synthetic oligonucleotide
aagaaatgttcgccatgaatt

SEQ ID NO: 20581 - RNA, 21 nt, synthetic construct
  source 1..21: mol_type = other RNA; note = Description of Artificial Sequence: Synthetic oligonucleotide
agaaatgttcgccatgaaatt

SEQ ID NO: 20582 - RNA, 21 nt, synthetic construct
  source 1..21: mol_type = other RNA; note = Description of Artificial Sequence: Synthetic oligonucleotide
gaaatgttcgccatgaaaatt

SEQ ID NO: 20583 - RNA, 21 nt, synthetic construct
  source 1..21: mol_type = other RNA; note = Description of Artificial Sequence: Synthetic oligonucleotide
aaatgttcgccatgaaaaatt

SEQ ID NO: 20584 - RNA, 21 nt, synthetic construct
  source 1..21: mol_type = other RNA; note = Description of Artificial Sequence: Synthetic oligonucleotide
aatgttcgccatgaaaacatt

SEQ ID NO: 20585 - RNA, 21 nt, synthetic construct
  source 1..21: mol_type = other RNA; note = Description of Artificial Sequence: Synthetic oligonucleotide
atgttcgccatgaaaactatt

SEQ ID NO: 20586 - RNA, 21 nt, synthetic construct
  source 1..21: mol_type = other RNA; note = Description of Artificial Sequence: Synthetic oligonucleotide
tgttcgccatgaaaactaatt

SEQ ID NO: 20587 - RNA, 21 nt, synthetic construct
  source 1..21: mol_type = other RNA; note = Description of Artificial Sequence: Synthetic oligonucleotide
gttcgccatgaaaactaaatt

SEQ ID NO: 20588 - RNA, 21 nt, synthetic construct
  source 1..21: mol_type = other RNA; note = Description of Artificial Sequence: Synthetic oligonucleotide
ttcgccatgaaaactaagatt

SEQ ID NO: 20589 - RNA, 21 nt, synthetic construct
  source 1..21: mol_type = other RNA; note = Description of Artificial Sequence: Synthetic oligonucleotide
tcgccatgaaaactaaggatt

SEQ ID NO: 20590 - RNA, 21 nt, synthetic construct
  source 1..21: mol_type = other RNA; note = Description of Artificial Sequence: Synthetic oligonucleotide
cgccatgaaaactaaggcatt

SEQ ID NO: 20591 - RNA, 21 nt, synthetic construct
  source 1..21: mol_type = other RNA; note = Description of Artificial Sequence: Synthetic oligonucleotide
gccatgaaaactaaggctatt

SEQ ID NO: 20592 - RNA, 21 nt, synthetic construct
  source 1..21: mol_type = other RNA; note = Description of Artificial Sequence: Synthetic oligonucleotide
ccatgaaaactaaggctgatt

SEQ ID NO: 20593 - RNA, 21 nt, synthetic construct
  source 1..21: mol_type = other RNA; note = Description of Artificial Sequence: Synthetic oligonucleotide
catgaaaactaaggctgcatt

SEQ ID NO: 20594 - RNA, 21 nt, synthetic construct
  source 1..21: mol_type = other RNA; note = Description of Artificial Sequence: Synthetic oligonucleotide
atgaaaactaaggctgccatt

SEQ ID NO: 20595 - RNA, 21 nt, synthetic construct
  source 1..21: mol_type = other RNA; note = Description of Artificial Sequence: Synthetic oligonucleotide
tgaaaactaaggctgcctatt

SEQ ID NO: 20596 - RNA, 21 nt, synthetic construct
  source 1..21: mol_type = other RNA; note = Description of Artificial Sequence: Synthetic oligonucleotide
gaaaactaaggctgccttatt

SEQ ID NO: 20597 - RNA, 21 nt, synthetic construct
  source 1..21: mol_type = other RNA; note = Description of Artificial Sequence: Synthetic oligonucleotide
aaaactaaggctgccttaatt

SEQ ID NO: 20598 - RNA, 21 nt, synthetic construct
  source 1..21: mol_type = other RNA; note = Description of Artificial Sequence: Synthetic oligonucleotide
aaactaaggctgccttagatt

SEQ ID NO: 20599 - RNA, 21 nt, synthetic construct
  source 1..21: mol_type = other RNA; note = Description of Artificial Sequence: Synthetic oligonucleotide
aactaaggctgccttagcatt

SEQ ID NO: 20600 - RNA, 21 nt, synthetic construct
  source 1..21: mol_type = other RNA; note = Description of Artificial Sequence: Synthetic oligonucleotide
actaaggctgccttagctatt

SEQ ID NO: 20601 - RNA, 21 nt, synthetic construct
  source 1..21: mol_type = other RNA; note = Description of Artificial Sequence: Synthetic oligonucleotide
ctaaggctgccttagctaatt

SEQ ID NO: 20602 - RNA, 21 nt, synthetic construct
  source 1..21: mol_type = other RNA; note = Description of Artificial Sequence: Synthetic oligonucleotide
taaggctgccttagctatatt

SEQ ID NO: 20603 - RNA, 21 nt, synthetic construct
  source 1..21: mol_type = other RNA; note = Description of Artificial Sequence: Synthetic oligonucleotide
aaggctgccttagctatcatt

SEQ ID NO: 20604 - RNA, 21 nt, synthetic construct
  source 1..21: mol_type = other RNA; note = Description of Artificial Sequence: Synthetic oligonucleotide
aggctgccttagctatctatt

SEQ ID NO: 20605 - RNA, 21 nt, synthetic construct
  source 1..21: mol_type = other RNA; note = Description of Artificial Sequence: Synthetic oligonucleotide
ggctgccttagctatctgatt

SEQ ID NO: 20606 - RNA, 21 nt, synthetic construct
  source 1..21: mol_type = other RNA; note = Description of Artificial Sequence: Synthetic oligonucleotide
gctgccttagctatctggatt

SEQ ID NO: 20607 - RNA, 21 nt, synthetic construct
  source 1..21: mol_type = other RNA; note = Description of Artificial Sequence: Synthetic oligonucleotide
ctgccttagctatctggtatt

SEQ ID NO: 20608 - RNA, 21 nt, synthetic construct
  source 1..21: mol_type = other RNA; note = Description of Artificial Sequence: Synthetic oligonucleotide
tgccttagctatctggtgatt

SEQ ID NO: 20609 - RNA, 21 nt, synthetic construct
  source 1..21: mol_type = other RNA; note = Description of Artificial Sequence: Synthetic oligonucleotide
gccttagctatctggtgcatt

SEQ ID NO: 20610 - RNA, 21 nt, synthetic construct
  source 1..21: mol_type = other RNA; note = Description of Artificial Sequence: Synthetic oligonucleotide
ccttagctatctggtgccatt

SEQ ID NO: 20611 - RNA, 21 nt, synthetic construct
  source 1..21: mol_type = other RNA; note = Description of Artificial Sequence: Synthetic oligonucleotide
cttagctatctggtgcccatt

SEQ ID NO: 20612 - RNA, 21 nt, synthetic construct
  source 1..21: mol_type = other RNA; note = Description of Artificial Sequence: Synthetic oligonucleotide
ttagctatctggtgcccaatt

SEQ ID NO: 20613 - RNA, 21 nt, synthetic construct
  source 1..21: mol_type = other RNA; note = Description of Artificial Sequence: Synthetic oligonucleotide
tagctatctggtgcccagatt

SEQ ID NO: 20614 - RNA, 21 nt, synthetic construct
  source 1..21: mol_type = other RNA; note = Description of Artificial Sequence: Synthetic oligonucleotide
agctatctggtgcccaggatt

SEQ ID NO: 20615 - RNA, 21 nt, synthetic construct
  source 1..21: mol_type = other RNA; note = Description of Artificial Sequence: Synthetic oligonucleotide
gctatctggtgcccaggcatt

SEQ ID NO: 20616 - RNA, 21 nt, synthetic construct
  source 1..21: mol_type = other RNA; note = Description of Artificial Sequence: Synthetic oligonucleotide
ctatctggtgcccaggctatt

SEQ ID NO: 20617 - RNA, 21 nt, synthetic construct
  source 1..21: mol_type = other RNA; note = Description of Artificial Sequence: Synthetic oligonucleotide
tatctggtgcccaggctaatt

SEQ ID NO: 20618 - RNA, 21 nt, synthetic construct
  source 1..21: mol_type = other RNA; note = Description of Artificial Sequence: Synthetic oligonucleotide
atctggtgcccaggctatatt

SEQ ID NO: 20619 - RNA, 21 nt, synthetic construct
  source 1..21: mol_type = other RNA; note = Description of Artificial Sequence: Synthetic oligonucleotide
tctggtgcccaggctattatt

SEQ ID NO: 20620 - RNA, 21 nt, synthetic construct
  source 1..21: mol_type = other RNA; note = Description of Artificial Sequence: Synthetic oligonucleotide
ctggtgcccaggctattcatt

SEQ ID NO: 20621 - RNA, 21 nt, synthetic construct
  source 1..21: mol_type = other RNA; note = Description of Artificial Sequence: Synthetic oligonucleotide
tggtgcccaggctattcgatt

SEQ ID NO: 20622 - RNA, 21 nt, synthetic construct
  source 1..21: mol_type = other RNA; note = Description of Artificial Sequence: Synthetic oligonucleotide
ggtgcccaggctattcggatt

SEQ ID NO: 20623 - RNA, 21 nt, synthetic construct
  source 1..21: mol_type = other RNA; note = Description of Artificial Sequence: Synthetic oligonucleotide
gtgcccaggctattcggaatt

SEQ ID NO: 20624 - RNA, 21 nt, synthetic construct
  source 1..21: mol_type = other RNA; note = Description of Artificial Sequence: Synthetic oligonucleotide
tgcccaggctattcggaaatt

SEQ ID NO: 20625 - RNA, 21 nt, synthetic construct
  source 1..21: mol_type = other RNA; note = Description of Artificial Sequence: Synthetic oligonucleotide
gcccaggctattcggaaaatt

SEQ ID NO: 20626 - RNA, 21 nt, synthetic construct
  source 1..21: mol_type = other RNA; note = Description of Artificial Sequence: Synthetic oligonucleotide
cccaggctattcggaaacatt

SEQ ID NO: 20627 - RNA, 21 nt, synthetic construct
  source 1..21: mol_type = other RNA; note = Description of Artificial Sequence: Synthetic oligonucleotide
ccaggctattcggaaactatt

SEQ ID NO: 20628 - RNA, 21 nt, synthetic construct
  source 1..21: mol_type = other RNA; note = Description of Artificial Sequence: Synthetic oligonucleotide
caggctattcggaaactcatt

SEQ ID NO: 20629 - RNA, 21 nt, synthetic construct
  source 1..21: mol_type = other RNA; note = Description of Artificial Sequence: Synthetic oligonucleotide
aggctattcggaaactcaatt

SEQ ID NO: 20630 - RNA, 21 nt, synthetic construct
  source 1..21: mol_type = other RNA; note = Description of Artificial Sequence: Synthetic oligonucleotide
ggctattcggaaactcagatt

SEQ ID NO: 20631 - RNA, 21 nt, synthetic construct
  source 1..21: mol_type = other RNA; note = Description of Artificial Sequence: Synthetic oligonucleotide
gctattcggaaactcagaatt

SEQ ID NO: 20632 - RNA, 21 nt, synthetic construct
  source 1..21: mol_type = other RNA; note = Description of Artificial Sequence: Synthetic oligonucleotide
ctattcggaaactcagatatt

SEQ ID NO: 20633 - RNA, 21 nt, synthetic construct
  source 1..21: mol_type = other RNA; note = Description of Artificial Sequence: Synthetic oligonucleotide
tattcggaaactcagataatt

SEQ ID NO: 20634 - RNA, 21 nt, synthetic construct
  source 1..21: mol_type = other RNA; note = Description of Artificial Sequence: Synthetic oligonucleotide
attcggaaactcagataaatt

SEQ ID NO: 20635 - RNA, 21 nt, synthetic construct
  source 1..21: mol_type = other RNA; note = Description of Artificial Sequence: Synthetic oligonucleotide
ttcggaaactcagataaaatt

SEQ ID NO: 20636 - RNA, 21 nt, synthetic construct
  source 1..21: mol_type = other RNA; note = Description of Artificial Sequence: Synthetic oligonucleotide
tcggaaactcagataaatatt

SEQ ID NO: 20637 - RNA, 21 nt, synthetic construct
  source 1..21: mol_type = other RNA; note = Description of Artificial Sequence: Synthetic oligonucleotide
cggaaactcagataaatgatt

SEQ ID NO: 20638 - RNA, 21 nt, synthetic construct
  source 1..21: mol_type = other RNA; note = Description of Artificial Sequence: Synthetic oligonucleotide
ggaaactcagataaatgcatt

SEQ ID NO: 20639 - RNA, 21 nt, synthetic construct
  source 1..21: mol_type = other RNA; note = Description of Artificial Sequence: Synthetic oligonucleotide
gaaactcagataaatgctatt

SEQ ID NO: 20640 - RNA, 21 nt, synthetic construct
  source 1..21: mol_type = other RNA; note = Description of Artificial Sequence: Synthetic oligonucleotide
aaactcagataaatgctaatt

SEQ ID NO: 20641 - RNA, 21 nt, synthetic construct
  source 1..21: mol_type = other RNA; note = Description of Artificial Sequence: Synthetic oligonucleotide
aactcagataaatgctacatt

SEQ ID NO: 20642 - RNA, 21 nt, synthetic construct
  source 1..21: mol_type = other RNA; note = Description of Artificial Sequence: Synthetic oligonucleotide
actcagataaatgctactatt

SEQ ID NO: 20643 - RNA, 21 nt, synthetic construct
  source 1..21: mol_type = other RNA; note = Description of Artificial Sequence: Synthetic oligonucleotide
ctcagataaatgctactcatt

SEQ ID NO: 20644 - RNA, 21 nt, synthetic construct
  source 1..21: mol_type = other RNA; note = Description of Artificial Sequence: Synthetic oligonucleotide
tcagataaatgctactcaatt

SEQ ID NO: 20645 - RNA, 21 nt, synthetic construct
  source 1..21: mol_type = other RNA; note = Description of Artificial Sequence: Synthetic oligonucleotide
cagataaatgctactcagatt

SEQ ID NO: 20646 - RNA, 21 nt, synthetic construct
  source 1..21: mol_type = other RNA; note = Description of Artificial Sequence: Synthetic oligonucleotide
agataaatgctactcaggatt

SEQ ID NO: 20647 - RNA, 21 nt, synthetic construct
  source 1..21: mol_type = other RNA; note = Description of Artificial Sequence: Synthetic oligonucleotide
gataaatgctactcaggcatt

SEQ ID NO: 20648 - RNA, 21 nt, synthetic construct
  source 1..21: mol_type = other RNA; note = Description of Artificial Sequence: Synthetic oligonucleotide
ataaatgctactcaggcaatt

SEQ ID NO: 20649 - RNA, 21 nt, synthetic construct
  source 1..21: mol_type = other RNA; note = Description of Artificial Sequence: Synthetic oligonucleotide
taaatgctactcaggcaaatt

SEQ ID NO: 20650 - RNA, 21 nt, synthetic construct
  source 1..21: mol_type = other RNA; note = Description of Artificial Sequence: Synthetic oligonucleotide
aaatgctactcaggcaatatt

SEQ ID NO: 20651 - RNA, 21 nt, synthetic construct
  source 1..21: mol_type = other RNA; note = Description of Artificial Sequence: Synthetic oligonucleotide
aatgctactcaggcaatgatt

SEQ ID NO: 20652 - RNA, 21 nt, synthetic construct
  source 1..21: mol_type = other RNA; note = Description of Artificial Sequence: Synthetic oligonucleotide
atgctactcaggcaatgaatt

SEQ ID NO: 20653 - RNA, 21 nt, synthetic construct
  source 1..21: mol_type = other RNA; note = Description of Artificial Sequence: Synthetic oligonucleotide
tgctactcaggcaatgaaatt

SEQ ID NO: 20654 - RNA, 21 nt, synthetic construct
  source 1..21: mol_type = other RNA; note = Description of Artificial Sequence: Synthetic oligonucleotide
gctactcaggcaatgaagatt

SEQ ID NO: 20655 - RNA, 21 nt, synthetic construct
  source 1..21: mol_type = other RNA; note = Description of Artificial Sequence: Synthetic oligonucleotide
ctactcaggcaatgaagaatt

SEQ ID NO: 20656 - RNA, 21 nt, synthetic construct
  source 1..21: mol_type = other RNA; note = Description of Artificial Sequence: Synthetic oligonucleotide
tactcaggcaatgaagaaatt

SEQ ID NO: 20657 - RNA, 21 nt, synthetic construct
  source 1..21: mol_type = other RNA; note = Description of Artificial Sequence: Synthetic oligonucleotide
actcaggcaatgaagaagatt

SEQ ID NO: 20658 - RNA, 21 nt, synthetic construct
  source 1..21: mol_type = other RNA; note = Description of Artificial Sequence: Synthetic oligonucleotide
ctcaggcaatgaagaagaatt

SEQ ID NO: 20659 - RNA, 21 nt, synthetic construct
  source 1..21: mol_type = other RNA; note = Description of Artificial Sequence: Synthetic oligonucleotide
tcaggcaatgaagaagagatt

SEQ ID NO: 20660 - RNA, 21 nt, synthetic construct
  source 1..21: mol_type = other RNA; note = Description of Artificial Sequence: Synthetic oligonucleotide
caggcaatgaagaagaggatt

SEQ ID NO: 20661 - RNA, 21 nt, synthetic construct
  source 1..21: mol_type = other RNA; note = Description of Artificial Sequence: Synthetic oligonucleotide
aggcaatgaagaagaggaatt

SEQ ID NO: 20662 - RNA, 21 nt, synthetic construct
  source 1..21: mol_type = other RNA; note = Description of Artificial Sequence: Synthetic oligonucleotide
ggcaatgaagaagaggagatt

SEQ ID NO: 20663 - RNA, 21 nt, synthetic construct
  source 1..21: mol_type = other RNA; note = Description of Artificial Sequence: Synthetic oligonucleotide
gcaatgaagaagaggagaatt

SEQ ID NO: 20664 - RNA, 21 nt, synthetic construct
  source 1..21: mol_type = other RNA; note = Description of Artificial Sequence: Synthetic oligonucleotide
caatgaagaagaggagaaatt

SEQ ID NO: 20665 - RNA, 21 nt, synthetic construct
  source 1..21: mol_type = other RNA; note = Description of Artificial Sequence: Synthetic oligonucleotide
aatgaagaagaggagaaaatt

SEQ ID NO: 20666 - RNA, 21 nt, synthetic construct
  source 1..21: mol_type = other RNA; note = Description of Artificial Sequence: Synthetic oligonucleotide
atgaagaagaggagaaaaatt

SEQ ID NO: 20667 - RNA, 21 nt, synthetic construct
  source 1..21: mol_type = other RNA; note = Description of Artificial Sequence: Synthetic oligonucleotide
tgaagaagaggagaaaaaatt

SEQ ID NO: 20668 - RNA, 21 nt, synthetic construct
  source 1..21: mol_type = other RNA; note = Description of Artificial Sequence: Synthetic oligonucleotide
gaagaagaggagaaaaagatt

SEQ ID NO: 20669 - RNA, 21 nt, synthetic construct
  source 1..21: mol_type = other RNA; note = Description of Artificial Sequence: Synthetic oligonucleotide
aagaagaggagaaaaaggatt

SEQ ID NO: 20670 - RNA, 21 nt, synthetic construct
  source 1..21: mol_type = other RNA; note = Description of Artificial Sequence: Synthetic oligonucleotide
agaagaggagaaaaaggaatt

SEQ ID NO: 20671 - RNA, 21 nt, synthetic construct
  source 1..21: mol_type = other RNA; note = Description of Artificial Sequence: Synthetic oligonucleotide
gaagaggagaaaaaggaaatt

SEQ ID NO: 20672 - RNA, 21 nt, synthetic construct
  source 1..21: mol_type = other RNA; note = Description of Artificial Sequence: Synthetic oligonucleotide
aagaggagaaaaaggaaaatt

SEQ ID NO: 20673 - RNA, 21 nt, synthetic construct
  source 1..21: mol_type = other RNA; note = Description of Artificial Sequence: Synthetic oligonucleotide
agaggagaaaaaggaaagatt

SEQ ID NO: 20674 - RNA, 21 nt, synthetic construct
  source 1..21: mol_type = other RNA; note = Description of Artificial Sequence: Synthetic oligonucleotide
gaggagaaaaaggaaagtatt

SEQ ID NO: 20675 - RNA, 21 nt, synthetic construct
  source 1..21: mol_type = other RNA; note = Description of Artificial Sequence: Synthetic oligonucleotide
aggagaaaaaggaaagtcatt

SEQ ID NO: 20676 - RNA, 21 nt, synthetic construct
  source 1..21: mol_type = other RNA; note = Description of Artificial Sequence: Synthetic oligonucleotide
ggagaaaaaggaaagtcaatt

SEQ ID NO: 20677 - RNA, 21 nt, synthetic construct
  source 1..21: mol_type = other RNA; note = Description of Artificial Sequence: Synthetic oligonucleotide
gagaaaaaggaaagtcacatt

SEQ ID NO: 20678 - RNA, 21 nt, synthetic construct
  source 1..21: mol_type = other RNA; note = Description of Artificial Sequence: Synthetic oligonucleotide
agaaaaaggaaagtcacaatt

SEQ ID NO: 20679 - RNA, 21 nt, synthetic construct
  source 1..21: mol_type = other RNA; note = Description of Artificial Sequence: Synthetic oligonucleotide
gaaaaaggaaagtcacaaatt

SEQ ID NO: 20680 - RNA, 21 nt, synthetic construct
  source 1..21: mol_type = other RNA; note = Description of Artificial Sequence: Synthetic oligonucleotide
aaaaaggaaagtcacaacatt

SEQ ID NO: 20681 - RNA, 21 nt, synthetic construct
  source 1..21: mol_type = other RNA; note = Description of Artificial Sequence: Synthetic oligonucleotide
aaaaggaaagtcacaaccatt

SEQ ID NO: 20682 - RNA, 21 nt, synthetic construct
  source 1..21: mol_type = other RNA; note = Description of Artificial Sequence: Synthetic oligonucleotide
aaaggaaagtcacaaccaatt

SEQ ID NO: 20683 - RNA, 21 nt, synthetic construct
  source 1..21: mol_type = other RNA; note = Description of Artificial Sequence: Synthetic oligonucleotide
aaggaaagtcacaaccaaatt

SEQ ID NO: 20684 - RNA, 21 nt, synthetic construct
  source 1..21: mol_type = other RNA; note = Description of Artificial Sequence: Synthetic oligonucleotide
aggaaagtcacaaccaatatt

SEQ ID NO: 20685 - RNA, 21 nt, synthetic construct
  source 1..21: mol_type = other RNA; note = Description of Artificial Sequence: Synthetic oligonucleotide
ggaaagtcacaaccaataatt

SEQ ID NO: 20686 - RNA, 21 nt, synthetic construct
  source 1..21: mol_type = other RNA; note = Description of Artificial Sequence: Synthetic oligonucleotide
gaaagtcacaaccaataaatt

SEQ ID NO: 20687 - RNA, 21 nt, synthetic construct
  source 1..21: mol_type = other RNA; note = Description of Artificial Sequence: Synthetic oligonucleotide
aaagtcacaaccaataaaatt

SEQ ID NO: 20688 - RNA, 21 nt, synthetic construct
  source 1..21: mol_type = other RNA; note = Description of Artificial Sequence: Synthetic oligonucleotide
aagtcacaaccaataaatatt

SEQ ID NO: 20689 - RNA, 21 nt, synthetic construct
  source 1..21: mol_type = other RNA; note = Description of Artificial Sequence: Synthetic oligonucleotide
agtcacaaccaataaatgatt

SEQ ID NO: 20690 - RNA, 21 nt, synthetic construct
  source 1..21: mol_type = other RNA; note = Description of Artificial Sequence: Synthetic oligonucleotide
gtcacaaccaataaatgtatt

SEQ ID NO: 20691 - RNA, 21 nt, synthetic construct
  source 1..21: mol_type = other RNA; note = Description of Artificial Sequence: Synthetic oligonucleotide
tcacaaccaataaatgtcatt

SEQ ID NO: 20692 - RNA, 21 nt, synthetic construct
  source 1..21: mol_type = other RNA; note = Description of Artificial Sequence: Synthetic oligonucleotide
cacaaccaataaatgtctatt

SEQ ID NO: 20693 - RNA, 21 nt, synthetic construct
  source 1..21: mol_type = other RNA; note = Description of Artificial Sequence: Synthetic oligonucleotide
acaaccaataaatgtctgatt

SEQ ID NO: 20694 - RNA, 21 nt, synthetic construct
  source 1..21: mol_type = other RNA; note = Description of Artificial Sequence: Synthetic oligonucleotide
caaccaataaatgtctggatt

SEQ ID NO: 20695 - RNA, 21 nt, synthetic construct
  source 1..21: mol_type = other RNA; note = Description of Artificial Sequence: Synthetic oligonucleotide
aaccaataaatgtctggaatt

SEQ ID NO: 20696 - RNA, 21 nt, synthetic construct
  source 1..21: mol_type = other RNA; note = Description of Artificial Sequence: Synthetic oligonucleotide
accaataaatgtctggaaatt

SEQ ID NO: 20697 - RNA, 21 nt, synthetic construct
  source 1..21: mol_type = other RNA; note = Description of Artificial Sequence: Synthetic oligonucleotide
ccaataaatgtctggaacatt

SEQ ID NO: 20698 - RNA, 21 nt, synthetic construct
  source 1..21: mol_type = other RNA; note = Description of Artificial Sequence: Synthetic oligonucleotide
caataaatgtctggaacaatt

SEQ ID NO: 20699 - RNA, 21 nt, synthetic construct
  source 1..21: mol_type = other RNA; note = Description of Artificial Sequence: Synthetic oligonucleotide
aataaatgtctggaacaaatt

SEQ ID NO: 20700 - RNA, 21 nt, synthetic construct
  source 1..21: mol_type = other RNA; note = Description of Artificial Sequence: Synthetic oligonucleotide
ataaatgtctggaacaagatt

SEQ ID NO: 20701 - RNA, 21 nt, synthetic construct
  source 1..21: mol_type = other RNA; note = Description of Artificial Sequence: Synthetic oligonucleotide
taaatgtctggaacaagtatt

SEQ ID NO: 20702 - RNA, 21 nt, synthetic construct
  source 1..21: mol_type = other RNA; note = Description of Artificial Sequence: Synthetic oligonucleotide
aaatgtctggaacaagtgatt

SEQ ID NO: 20703 - RNA, 21 nt, synthetic construct
  source 1..21: mol_type = other RNA; note = Description of Artificial Sequence: Synthetic oligonucleotide
aatgtctggaacaagtgtatt

SEQ ID NO: 20704 - RNA, 21 nt, synthetic construct
  source 1..21: mol_type = other RNA; note = Description of Artificial Sequence: Synthetic oligonucleotide
atgtctggaacaagtgtcatt

SEQ ID NO: 20705 - RNA, 21 nt, synthetic construct
  source 1..21: mol_type = other RNA; note = Description of Artificial Sequence: Synthetic oligonucleotide
tgtctggaacaagtgtcaatt

SEQ ID NO: 20706 - RNA, 21 nt, synthetic construct
  source 1..21: mol_type = other RNA; note = Description of Artificial Sequence: Synthetic oligonucleotide
gtctggaacaagtgtcacatt

SEQ ID NO: 20707 - RNA, 21 nt, synthetic construct
  source 1..21: mol_type = other RNA; note = Description of Artificial Sequence: Synthetic oligonucleotide
tctggaacaagtgtcacaatt

SEQ ID NO: 20708 - RNA, 21 nt, synthetic construct
  source 1..21: mol_type = other RNA; note = Description of Artificial Sequence: Synthetic oligonucleotide
ctggaacaagtgtcacaaatt

SEQ ID NO: 20709 - RNA, 21 nt, synthetic construct
  source 1..21: mol_type = other RNA; note = Description of Artificial Sequence: Synthetic oligonucleotide
tggaacaagtgtcacaatatt

SEQ ID NO: 20710 - RNA, 21 nt, synthetic construct
  source 1..21: mol_type = other RNA; note = Description of Artificial Sequence: Synthetic oligonucleotide
ggaacaagtgtcacaattatt

SEQ ID NO: 20711 - RNA, 21 nt, synthetic construct
  source 1..21: mol_type = other RNA; note = Description of Artificial Sequence: Synthetic oligonucleotide
gaacaagtgtcacaattaatt

SEQ ID NO: 20712 - RNA, 21 nt, synthetic construct
  source 1..21: mol_type = other RNA; note = Description of Artificial Sequence: Synthetic oligonucleotide
aacaagtgtcacaattacatt

SEQ ID NO: 20713 - RNA, 21 nt, synthetic construct
  source 1..21: mol_type = other RNA; note = Description of Artificial Sequence: Synthetic oligonucleotide
acaagtgtcacaattacaatt

SEQ ID NO: 20714 - RNA, 21 nt, synthetic construct
  source 1..21: mol_type = other RNA; note = Description of Artificial Sequence: Synthetic oligonucleotide
caagtgtcacaattacaaatt

SEQ ID NO: 20715 - RNA, 21 nt, synthetic construct
  source 1..21: mol_type = other RNA; note = Description of Artificial Sequence: Synthetic oligonucleotide
aagtgtcacaattacaagatt

SEQ ID NO: 20716 - RNA, 21 nt, synthetic construct
  source 1..21: mol_type = other RNA; note = Description of Artificial Sequence: Synthetic oligonucleotide
agtgtcacaattacaaggatt

SEQ ID NO: 20717 - RNA, 21 nt, synthetic construct
  source 1..21: mol_type = other RNA; note = Description of Artificial Sequence: Synthetic oligonucleotide
gtgtcacaattacaaggaatt

SEQ ID NO: 20718 - RNA, 21 nt, synthetic construct
  source 1..21: mol_type = other RNA; note = Description of Artificial Sequence: Synthetic oligonucleotide
tgtcacaattacaaggatatt

SEQ ID NO: 20719 - RNA, 21 nt, synthetic construct
  source 1..21: mol_type = other RNA; note = Description of Artificial Sequence: Synthetic oligonucleotide
gtcacaattacaaggattatt

SEQ ID NO: 20720 - RNA, 21 nt, synthetic construct
  source 1..21: mol_type = other RNA; note = Description of Artificial Sequence: Synthetic oligonucleotide
tcacaattacaaggattgatt

SEQ ID NO: 20721 - RNA, 21 nt, synthetic construct
  source 1..21: mol_type = other RNA; note = Description of Artificial Sequence: Synthetic oligonucleotide
cacaattacaaggattgtatt

SEQ ID NO: 20722 - RNA, 21 nt, synthetic construct
  source 1..21: mol_type = other RNA; note = Description of Artificial Sequence: Synthetic oligonucleotide
acaattacaaggattgtgatt

SEQ ID NO: 20723 - RNA, 21 nt, synthetic construct
  source 1..21: mol_type = other RNA; note = Description of Artificial Sequence: Synthetic oligonucleotide
caattacaaggattgtggatt

SEQ ID NO: 20724 - RNA, 21 nt, synthetic construct
  source 1..21: mol_type = other RNA; note = Description of Artificial Sequence: Synthetic oligonucleotide
aattacaaggattgtggcatt

SEQ ID NO: 20725 - RNA, 21 nt, synthetic construct
  source 1..21: mol_type = other RNA; note = Description of Artificial Sequence: Synthetic oligonucleotide
attacaaggattgtggcgatt

SEQ ID NO: 20726 - RNA, 21 nt, synthetic construct
  source 1..21: mol_type = other RNA; note = Description of Artificial Sequence: Synthetic oligonucleotide
ttacaaggattgtggcgtatt

SEQ ID NO: 20727 - RNA, 21 nt, synthetic construct
  source 1..21: mol_type = other RNA; note = Description of Artificial Sequence: Synthetic oligonucleotide
tacaaggattgtggcgtcatt

SEQ ID NO: 20728 - RNA, 21 nt, synthetic construct
  source 1..21: mol_type = other RNA; note = Description of Artificial Sequence: Synthetic oligonucleotide
acaaggattgtggcgtcgatt

SEQ ID NO: 20729 - RNA, 21 nt, synthetic construct
  source 1..21: mol_type = other RNA; note = Description of Artificial Sequence: Synthetic oligonucleotide
caaggattgtggcgtcgcatt

SEQ ID NO: 20730 - RNA, 21 nt, synthetic construct
  source 1..21: mol_type = other RNA; note = Description of Artificial Sequence: Synthetic oligonucleotide
aaggattgtggcgtcgctatt

SEQ ID NO: 20731 - RNA, 21 nt, synthetic construct
  source 1..21: mol_type = other RNA; note = Description of Artificial Sequence: Synthetic oligonucleotide
aggattgtggcgtcgcttatt

SEQ ID NO: 20732 - RNA, 21 nt, synthetic construct
  source 1..21: mol_type = other RNA; note = Description of Artificial Sequence: Synthetic oligonucleotide
ggattgtggcgtcgcttcatt

SEQ ID NO: 20733 - RNA, 21 nt, synthetic construct
  source 1..21: mol_type = other RNA; note = Description of Artificial Sequence: Synthetic oligonucleotide
gattgtggcgtcgcttcaatt

SEQ ID NO: 20734 - RNA, 21 nt, synthetic construct
  source 1..21: mol_type = other RNA; note = Description of Artificial Sequence: Synthetic oligonucleotide
attgtggcgtcgcttcaaatt

SEQ ID NO: 20735 - RNA, 21 nt, synthetic construct
  source 1..21: mol_type = other RNA; note = Description of Artificial Sequence: Synthetic oligonucleotide
ttgtggcgtcgcttcaatatt

SEQ ID NO: 20736 - RNA, 21 nt, synthetic construct
  source 1..21: mol_type = other RNA; note = Description of Artificial Sequence: Synthetic oligonucleotide
tgtggcgtcgcttcaatcatt

SEQ ID NO: 20737 - RNA, 21 nt, synthetic construct
  source 1..21: mol_type = other RNA; note = Description of Artificial Sequence: Synthetic oligonucleotide
gtggcgtcgcttcaatcgatt

SEQ ID NO: 20738 - RNA, 21 nt, synthetic construct
  source 1..21: mol_type = other RNA; note = Description of Artificial Sequence: Synthetic oligonucleotide
tggcgtcgcttcaatcgaatt

SEQ ID NO: 20739 - RNA, 21 nt, synthetic construct
  source 1..21: mol_type = other RNA; note = Description of Artificial Sequence: Synthetic oligonucleotide
ggcgtcgcttcaatcgacatt

SEQ ID NO: 20740 - RNA, 21 nt, synthetic construct
  source 1..21: mol_type = other RNA; note = Description of Artificial Sequence: Synthetic oligonucleotide
gcgtcgcttcaatcgaccatt

SEQ ID NO: 20741 - RNA, 21 nt, synthetic construct
  source 1..21: mol_type = other RNA; note = Description of Artificial Sequence: Synthetic oligonucleotide
cgtcgcttcaatcgacctatt

SEQ ID NO: 20742 - RNA, 21 nt, synthetic construct
  source 1..21: mol_type = other RNA; note = Description of Artificial Sequence: Synthetic oligonucleotide
gtcgcttcaatcgaccttatt

SEQ ID NO: 20743 - RNA, 21 nt, synthetic construct
  source 1..21: mol_type = other RNA; note = Description of Artificial Sequence: Synthetic oligonucleotide
tcgcttcaatcgacctttatt

SEQ ID NO: 20744 - RNA, 21 nt, synthetic construct
  source 1..21: mol_type = other RNA; note = Description of Artificial Sequence: Synthetic oligonucleotide
cgcttcaatcgacctttaatt

SEQ ID NO: 20745 - RNA, 21 nt, synthetic construct
  source 1..21: mol_type = other RNA; note = Description of Artificial Sequence: Synthetic oligonucleotide
gcttcaatcgacctttacatt

SEQ ID NO: 20746 - RNA, 21 nt, synthetic construct
  source 1..21: mol_type = other RNA; note = Description of Artificial Sequence: Synthetic oligonucleotide
cttcaatcgacctttactatt

SEQ ID NO: 20747 - RNA, 21 nt, synthetic construct
  source 1..21: mol_type = other RNA; note = Description of Artificial Sequence: Synthetic oligonucleotide
ttcaatcgacctttactgatt

SEQ ID NO: 20748 - RNA, 21 nt, synthetic construct
  source 1..21: mol_type = other RNA; note = Description of Artificial Sequence: Synthetic oligonucleotide
tcaatcgacctttactgaatt

SEQ ID NO: 20749 - RNA, 21 nt, synthetic construct
  source 1..21: mol_type = other RNA; note = Description of Artificial Sequence: Synthetic oligonucleotide
caatcgacctttactgaaatt

SEQ ID NO: 20750 - RNA, 21 nt, synthetic construct
  source 1..21: mol_type = other RNA; note = Description of Artificial Sequence: Synthetic oligonucleotide
aatcgacctttactgaaaatt

SEQ ID NO: 20751 - RNA, 21 nt, synthetic construct
  source 1..21: mol_type = other RNA; note = Description of Artificial Sequence: Synthetic oligonucleotide
atcgacctttactgaaacatt

SEQ ID NO: 20752 - RNA, 21 nt, synthetic construct
  source 1..21: mol_type = other RNA; note = Description of Artificial Sequence: Synthetic oligonucleotide
tcgacctttactgaaacaatt

SEQ ID NO: 20753 - RNA, 21 nt, synthetic construct
  source 1..21: mol_type = other RNA; note = Description of Artificial Sequence: Synthetic oligonucleotide
cgacctttactgaaacaaatt

SEQ ID NO: 20754 - RNA, 21 nt, synthetic construct
  source 1..21: mol_type = other RNA; note = Description of Artificial Sequence: Synthetic oligonucleotide
gacctttactgaaacaacatt

SEQ ID NO: 20755 - RNA, 21 nt, synthetic construct
  source 1..21: mol_type = other RNA; note = Description of Artificial Sequence: Synthetic oligonucleotide
acctttactgaaacaacaatt

SEQ ID NO: 20756 - RNA, 21 nt, synthetic construct
  source 1..21: mol_type = other RNA; note = Description of Artificial Sequence: Synthetic oligonucleotide
cctttactgaaacaacagatt

SEQ ID NO: 20757 - RNA, 21 nt, synthetic construct
  source 1..21: mol_type = other RNA; note = Description of Artificial Sequence: Synthetic oligonucleotide
ctttactgaaacaacagtatt

SEQ ID NO: 20758 - RNA, 21 nt, synthetic construct
  source 1..21: mol_type = other RNA; note = Description of Artificial Sequence: Synthetic oligonucleotide
tttactgaaacaacagtaatt

SEQ ID NO: 20759 - RNA, 21 nt, synthetic construct
  source 1..21: mol_type = other RNA; note = Description of Artificial Sequence: Synthetic oligonucleotide
ttactgaaacaacagtaaatt

SEQ ID NO: 20760 - RNA, 21 nt, synthetic construct
  source 1..21: mol_type = other RNA; note = Description of Artificial Sequence: Synthetic oligonucleotide
tactgaaacaacagtaaaatt

SEQ ID NO: 20761 - RNA, 21 nt, synthetic construct
  source 1..21: mol_type = other RNA; note = Description of Artificial Sequence: Synthetic oligonucleotide
actgaaacaacagtaaacatt

SEQ ID NO: 20762 - RNA, 21 nt, synthetic construct
  source 1..21: mol_type = other RNA; note = Description of Artificial Sequence: Synthetic oligonucleotide
ctgaaacaacagtaaaccatt

SEQ ID NO: 20763 - RNA, 21 nt, synthetic construct
  source 1..21: mol_type = other RNA; note = Description of Artificial Sequence: Synthetic oligonucleotide
tgaaacaacagtaaaccaatt

SEQ ID NO: 20764 - RNA, 21 nt, synthetic construct
  source 1..21: mol_type = other RNA; note = Description of Artificial Sequence: Synthetic oligonucleotide
gaaacaacagtaaaccatatt

SEQ ID NO: 20765 - RNA, 21 nt, synthetic construct
  source 1..21: mol_type = other RNA; note = Description of Artificial Sequence: Synthetic oligonucleotide
aaacaacagtaaaccatcatt

SEQ ID NO: 20766 - RNA, 21 nt, synthetic construct
  source 1..21: mol_type = other RNA; note = Description of Artificial Sequence: Synthetic oligonucleotide
aacaacagtaaaccatctatt

SEQ ID NO: 20767 - RNA, 21 nt, synthetic construct
  source 1..21: mol_type = other RNA; note = Description of Artificial Sequence: Synthetic oligonucleotide
acaacagtaaaccatcttatt

SEQ ID NO: 20768 - RNA, 21 nt, synthetic construct
  source 1..21: mol_type = other RNA; note = Description of Artificial Sequence: Synthetic oligonucleotide
caacagtaaaccatctttatt

SEQ ID NO: 20769 - RNA, 21 nt, synthetic construct
  source 1..21: mol_type = other RNA; note = Description of Artificial Sequence: Synthetic oligonucleotide
aacagtaaaccatctttaatt

SEQ ID NO: 20770 - RNA, 21 nt, synthetic construct
  source 1..21: mol_type = other RNA; note = Description of Artificial Sequence: Synthetic oligonucleotide
acagtaaaccatctttatatt

SEQ ID NO: 20771 - RNA, 21 nt, synthetic construct
  source 1..21: mol_type = other RNA; note = Description of Artificial Sequence: Synthetic oligonucleotide
cagtaaaccatctttattatt

SEQ ID NO: 20772 - RNA, 21 nt, synthetic construct
  source 1..21: mol_type = other RNA; note = Description of Artificial Sequence: Synthetic oligonucleotide
agtaaaccatctttattaatt

SEQ ID NO: 20773 - RNA, 21 nt, synthetic construct
  source 1..21: mol_type = other RNA; note = Description of Artificial Sequence: Synthetic oligonucleotide
gtaaaccatctttattatatt

SEQ ID NO: 20774 - RNA, 21 nt, synthetic construct
  source 1..21: mol_type = other RNA; note = Description of Artificial Sequence: Synthetic oligonucleotide
taaaccatctttattatgatt

SEQ ID NO: 20775 - RNA, 21 nt, synthetic construct
  source 1..21: mol_type = other RNA; note = Description of Artificial Sequence: Synthetic oligonucleotide
aaaccatctttattatggatt

SEQ ID NO: 20776 - RNA, 21 nt, synthetic construct
  source 1..21: mol_type = other RNA; note = Description of Artificial Sequence: Synthetic oligonucleotide
aaccatctttattatggtatt

SEQ ID NO: 20777 - RNA, 21 nt, synthetic construct
  source 1..21: mol_type = other RNA; note = Description of Artificial Sequence: Synthetic oligonucleotide
accatctttattatggtcatt

SEQ ID NO: 20778 - RNA, 21 nt, synthetic construct
  source 1..21: mol_type = other RNA; note = Description of Artificial Sequence: Synthetic oligonucleotide
ccatctttattatggtcaatt

SEQ ID NO: 20779 - RNA, 21 nt, synthetic construct
  source 1..21: mol_type = other RNA; note = Description of Artificial Sequence: Synthetic oligonucleotide
catctttattatggtcatatt

SEQ ID NO: 20780 - RNA, 21 nt, synthetic construct
  source 1..21: mol_type = other RNA; note = Description of Artificial Sequence: Synthetic oligonucleotide
atctttattatggtcataatt

SEQ ID NO: 20781 - RNA, 21 nt, synthetic construct
  source 1..21: mol_type = other RNA; note = Description of Artificial Sequence: Synthetic oligonucleotide
tctttattatggtcatatatt

SEQ ID NO: 20782 - RNA, 21 nt, synthetic construct
  source 1..21: mol_type = other RNA; note = Description of Artificial Sequence: Synthetic oligonucleotide
ctttattatggtcatattatt

SEQ ID NO: 20783 - RNA, 21 nt, synthetic construct
  source 1..21: mol_type = other RNA; note = Description of Artificial Sequence: Synthetic oligonucleotide
tttattatggtcatatttatt

SEQ ID NO: 20784 - RNA, 21 nt, synthetic construct
  source 1..21: mol_type = other RNA; note = Description of Artificial Sequence: Synthetic oligonucleotide
ttattatggtcatatttcatt

SEQ ID NO: 20785 - RNA, 21 nt, synthetic construct
  source 1..21: mol_type = other RNA; note = Description of Artificial Sequence: Synthetic oligonucleotide
tattatggtcatatttcaatt

SEQ ID NO: 20786 - RNA, 21 nt, synthetic construct
  source 1..21: mol_type = other RNA; note = Description of Artificial Sequence: Synthetic oligonucleotide
attatggtcatatttcacatt

SEQ ID NO: 20787 - RNA, 21 nt, synthetic construct
  source 1..21: mol_type = other RNA; note = Description of Artificial Sequence: Synthetic oligonucleotide
ttatggtcatatttcacaatt

SEQ ID NO: 20788 - RNA, 21 nt, synthetic construct
  source 1..21: mol_type = other RNA; note = Description of Artificial Sequence: Synthetic oligonucleotide
tatggtcatatttcacagatt

SEQ ID NO: 20789 - RNA, 21 nt, synthetic construct
  source 1..21: mol_type = other RNA; note = Description of Artificial Sequence: Synthetic oligonucleotide
atggtcatatttcacagcatt

SEQ ID NO: 20790 - RNA, 21 nt, synthetic construct
  source 1..21: mol_type = other RNA; note = Description of Artificial Sequence: Synthetic oligonucleotide
tggtcatatttcacagcaatt

SEQ ID NO: 20791 - RNA, 21 nt, synthetic construct
  source 1..21: mol_type = other RNA; note = Description of Artificial Sequence: Synthetic oligonucleotide
ggtcatatttcacagcacatt

SEQ ID NO: 20792 - RNA, 21 nt, synthetic construct
  source 1..21: mol_type = other RNA; note = Description of Artificial Sequence: Synthetic oligonucleotide
gtcatatttcacagcaccatt

SEQ ID NO: 20793 - RNA, 21 nt, synthetic construct
  source 1..21: mol_type = other RNA; note = Description of Artificial Sequence: Synthetic oligonucleotide
tcatatttcacagcaccaatt

SEQ ID NO: 20794 - RNA, 21 nt, synthetic construct
  source 1..21: mol_type = other RNA; note = Description of Artificial Sequence: Synthetic oligonucleotide
catatttcacagcaccaaatt

SEQ ID NO: 20795 - RNA, 21 nt, synthetic construct
  source 1..21: mol_type = other RNA; note = Description of Artificial Sequence: Synthetic oligonucleotide
atatttcacagcaccaaaatt

SEQ ID NO: 20796 - RNA, 21 nt, synthetic construct
  source 1..21: mol_type = other RNA; note = Description of Artificial Sequence: Synthetic oligonucleotide
tatttcacagcaccaaaaatt

SEQ ID NO: 20797 - RNA, 21 nt, synthetic construct
  source 1..21: mol_type = other RNA; note = Description of Artificial Sequence: Synthetic oligonucleotide
atttcacagcaccaaaatatt

SEQ ID NO: 20798 - RNA, 21 nt, synthetic construct
  source 1..21: mol_type = other RNA; note = Description of Artificial Sequence: Synthetic oligonucleotide
tttcacagcaccaaaataatt

SEQ ID NO: 20799 - RNA, 21 nt, synthetic construct
  source 1..21: mol_type = other RNA; note = Description of Artificial Sequence: Synthetic oligonucleotide
ttcacagcaccaaaataaatt

SEQ ID NO: 20800 - RNA, 21 nt, synthetic construct
  source 1..21: mol_type = other RNA; note = Description of Artificial Sequence: Synthetic oligonucleotide
tcacagcaccaaaataaaatt

SEQ ID NO: 20801 - RNA, 21 nt, synthetic construct
  source 1..21: mol_type = other RNA; note = Description of Artificial Sequence: Synthetic oligonucleotide
cacagcaccaaaataaatatt

SEQ ID NO: 20802 - RNA, 21 nt, synthetic construct
  source 1..21: mol_type = other RNA; note = Description of Artificial Sequence: Synthetic oligonucleotide
acagcaccaaaataaatcatt

SEQ ID NO: 20803 - RNA, 21 nt, synthetic construct
  source 1..21: mol_type = other RNA; note = Description of Artificial Sequence: Synthetic oligonucleotide
cagcaccaaaataaatcaatt

SEQ ID NO: 20804 - RNA, 21 nt, synthetic construct
  source 1..21: mol_type = other RNA; note = Description of Artificial Sequence: Synthetic oligonucleotide
agcaccaaaataaatcatatt

SEQ ID NO: 20805 - RNA, 21 nt, synthetic construct
  source 1..21: mol_type = other RNA; note = Description of Artificial Sequence: Synthetic oligonucleotide
gcaccaaaataaatcatcatt

SEQ ID NO: 20806 - RNA, 21 nt, synthetic construct
  source 1..21: mol_type = other RNA; note = Description of Artificial Sequence: Synthetic oligonucleotide
caccaaaataaatcatctatt

SEQ ID NO: 20807 - RNA, 21 nt, synthetic construct
  source 1..21: mol_type = other RNA; note = Description of Artificial Sequence: Synthetic oligonucleotide
accaaaataaatcatcttatt

SEQ ID NO: 20808 - RNA, 21 nt, synthetic construct
  source 1..21: mol_type = other RNA; note = Description of Artificial Sequence: Synthetic oligonucleotide
ccaaaataaatcatctttatt

SEQ ID NO: 20809 - RNA, 21 nt, synthetic construct
  source 1..21: mol_type = other RNA; note = Description of Artificial Sequence: Synthetic oligonucleotide
caaaataaatcatctttaatt

SEQ ID NO: 20810 - RNA, 21 nt, synthetic construct
  source 1..21: mol_type = other RNA; note = Description of Artificial Sequence: Synthetic oligonucleotide
aaaataaatcatctttatatt

SEQ ID NO: 20811 - RNA, 21 nt, synthetic construct
  source 1..21: mol_type = other RNA; note = Description of Artificial Sequence: Synthetic oligonucleotide
aaataaatcatctttattatt

SEQ ID NO: 20812 - RNA, 21 nt, synthetic construct
  source 1..21: mol_type = other RNA; note = Description of Artificial Sequence: Synthetic oligonucleotide
aataaatcatctttattaatt

SEQ ID NO: 20813 - RNA, 21 nt, synthetic construct
  source 1..21: mol_type = other RNA; note = Description of Artificial Sequence: Synthetic oligonucleotide
ataaatcatctttattaaatt

SEQ ID NO: 20814 - RNA, 21 nt, synthetic construct
  source 1..21: mol_type = other RNA; note = Description of Artificial Sequence: Synthetic oligonucleotide
taaatcatctttattaagatt

SEQ ID NO: 20815 - RNA, 21 nt, synthetic construct
  source 1..21: mol_type = other RNA; note = Description of Artificial Sequence: Synthetic oligonucleotide
aaatcatctttattaagtatt

SEQ ID NO: 20816 - RNA, 21 nt, synthetic construct
  source 1..21: mol_type = other RNA; note = Description of Artificial Sequence: Synthetic oligonucleotide
aatcatctttattaagtaatt

SEQ ID NO: 20817 - RNA, 21 nt, synthetic construct
  source 1..21: mol_type = other RNA; note = Description of Artificial Sequence: Synthetic oligonucleotide
atcatctttattaagtagatt

SEQ ID NO: 20818 - RNA, 21 nt, synthetic construct
  source 1..21: mol_type = other RNA; note = Description of Artificial Sequence: Synthetic oligonucleotide
tcatctttattaagtagaatt

SEQ ID NO: 20819 - RNA, 21 nt, synthetic construct
  source 1..21: mol_type = other RNA; note = Description of Artificial Sequence: Synthetic oligonucleotide
catctttattaagtagatatt

SEQ ID NO: 20820 - RNA, 21 nt, synthetic construct
  source 1..21: mol_type = other RNA; note = Description of Artificial Sequence: Synthetic oligonucleotide
atctttattaagtagatgatt

SEQ ID NO: 20821 - RNA, 21 nt, synthetic construct
  source 1..21: mol_type = other RNA; note = Description of Artificial Sequence: Synthetic oligonucleotide
tctttattaagtagatgaatt

SEQ ID NO: 20822 - RNA, 21 nt, synthetic construct
  source 1..21: mol_type = other RNA; note = Description of Artificial Sequence: Synthetic oligonucleotide
ctttattaagtagatgaaatt

SEQ ID NO: 20823 - RNA, 21 nt, synthetic construct
  source 1..21: mol_type = other RNA; note = Description of Artificial Sequence: Synthetic oligonucleotide
tttattaagtagatgaaaatt

SEQ ID NO: 20824 - RNA, 21 nt, synthetic construct
  source 1..21: mol_type = other RNA; note = Description of Artificial Sequence: Synthetic oligonucleotide
ttattaagtagatgaaacatt

SEQ ID NO: 20825 - RNA, 21 nt, synthetic construct
  source 1..21: mol_type = other RNA; note = Description of Artificial Sequence: Synthetic oligonucleotide
tattaagtagatgaaacaatt

SEQ ID NO: 20826 - RNA, 21 nt, synthetic construct
  source 1..21: mol_type = other RNA; note = Description of Artificial Sequence: Synthetic oligonucleotide
attaagtagatgaaacatatt

SEQ ID NO: 20827 - RNA, 21 nt, synthetic construct
  source 1..21: mol_type = other RNA; note = Description of Artificial Sequence: Synthetic oligonucleotide
ttaagtagatgaaacattatt

SEQ ID NO: 20828 - RNA, 21 nt, synthetic construct
  source 1..21: mol_type = other RNA; note = Description of Artificial Sequence: Synthetic oligonucleotide
taagtagatgaaacattaatt

SEQ ID NO: 20829 - RNA, 21 nt, synthetic construct
  source 1..21: mol_type = other RNA; note = Description of Artificial Sequence: Synthetic oligonucleotide
aagtagatgaaacattaaatt

SEQ ID NO: 20830 - RNA, 21 nt, synthetic construct
  source 1..21: mol_type = other RNA; note = Description of Artificial Sequence: Synthetic oligonucleotide
agtagatgaaacattaacatt

SEQ ID NO: 20831 - RNA, 21 nt, synthetic construct
  source 1..21: mol_type = other RNA; note = Description of Artificial Sequence: Synthetic oligonucleotide
gtagatgaaacattaactatt

SEQ ID NO: 20832 - RNA, 21 nt, synthetic construct
  source 1..21: mol_type = other RNA; note = Description of Artificial Sequence: Synthetic oligonucleotide
tagatgaaacattaactcatt

SEQ ID NO: 20833 - RNA, 21 nt, synthetic construct
  source 1..21: mol_type = other RNA; note = Description of Artificial Sequence: Synthetic oligonucleotide
agatgaaacattaactctatt

SEQ ID NO: 20834 - RNA, 21 nt, synthetic construct
  source 1..21: mol_type = other RNA; note = Description of Artificial Sequence: Synthetic oligonucleotide
gatgaaacattaactctaatt

SEQ ID NO: 20835 - RNA, 21 nt, synthetic construct
  source 1..21: mol_type = other RNA; note = Description of Artificial Sequence: Synthetic oligonucleotide
atgaaacattaactctaaatt

SEQ ID NO: 20836 - RNA, 21 nt, synthetic construct
  source 1..21: mol_type = other RNA; note = Description of Artificial Sequence: Synthetic oligonucleotide
tgaaacattaactctaacatt

SEQ ID NO: 20837 - RNA, 21 nt, synthetic construct
  source 1..21: mol_type = other RNA; note = Description of Artificial Sequence: Synthetic oligonucleotide
gaaacattaactctaactatt

SEQ ID NO: 20838 - RNA, 21 nt, synthetic construct
  source 1..21: mol_type = other RNA; note = Description of Artificial Sequence: Synthetic oligonucleotide
aaacattaactctaactgatt

SEQ ID NO: 20839 - RNA, 21 nt, synthetic construct
  source 1..21: mol_type = other RNA; note = Description of Artificial Sequence: Synthetic oligonucleotide
aacattaactctaactgtatt

SEQ ID NO: 20840 - RNA, 21 nt, synthetic construct
  source 1..21: mol_type = other RNA; note = Description of Artificial Sequence: Synthetic oligonucleotide
acattaactctaactgtgatt

SEQ ID NO: 20841 - RNA, 21 nt, synthetic construct
  source 1..21: mol_type = other RNA; note = Description of Artificial Sequence: Synthetic oligonucleotide
cattaactctaactgtgaatt

SEQ ID NO: 20842 - RNA, 21 nt, synthetic construct
  source 1..21: mol_type = other RNA; note = Description of Artificial Sequence: Synthetic oligonucleotide
attaactctaactgtgacatt

SEQ ID NO: 20843 - RNA, 21 nt, synthetic construct
  source 1..21: mol_type = other RNA; note = Description of Artificial Sequence: Synthetic oligonucleotide
ttaactctaactgtgacaatt

SEQ ID NO: 20844 - RNA, 21 nt, synthetic construct
  source 1..21: mol_type = other RNA; note = Description of Artificial Sequence: Synthetic oligonucleotide
taactctaactgtgacaaatt

SEQ ID NO: 20845 - RNA, 21 nt, synthetic construct
  source 1..21: mol_type = other RNA; note = Description of Artificial Sequence: Synthetic oligonucleotide
aactctaactgtgacaaaatt

SEQ ID NO: 20846 - RNA, 21 nt, synthetic construct
  source 1..21: mol_type = other RNA; note = Description of Artificial Sequence: Synthetic oligonucleotide
actctaactgtgacaaagatt

SEQ ID NO: 20847 - RNA, 21 nt, synthetic construct
  source 1..21: mol_type = other RNA; note = Description of Artificial Sequence: Synthetic oligonucleotide
ctctaactgtgacaaagaatt

SEQ ID NO: 20848 - RNA, 21 nt, synthetic construct
  source 1..21: mol_type = other RNA; note = Description of Artificial Sequence: Synthetic oligonucleotide
tctaactgtgacaaagaaatt

SEQ ID NO: 20849 - RNA, 21 nt, synthetic construct
  source 1..21: mol_type = other RNA; note = Description of Artificial Sequence: Synthetic oligonucleotide
ctaactgtgacaaagaagatt

SEQ ID NO: 20850 - RNA, 21 nt, synthetic construct
  source 1..21: mol_type = other RNA; note = Description of Artificial Sequence: Synthetic oligonucleotide
taactgtgacaaagaagaatt

SEQ ID NO: 20851 - RNA, 21 nt, synthetic construct
  source 1..21: mol_type = other RNA; note = Description of Artificial Sequence: Synthetic oligonucleotide
aactgtgacaaagaagacatt

SEQ ID NO: 20852 - RNA, 21 nt, synthetic construct
  source 1..21: mol_type = other RNA; note = Description of Artificial Sequence: Synthetic oligonucleotide
actgtgacaaagaagaccatt

SEQ ID NO: 20853 - RNA, 21 nt, synthetic construct
  source 1..21: mol_type = other RNA; note = Description of Artificial Sequence: Synthetic oligonucleotide
ctgtgacaaagaagaccaatt

SEQ ID NO: 20854 - RNA, 21 nt, synthetic construct
  source 1..21: mol_type = other RNA; note = Description of Artificial Sequence: Synthetic oligonucleotide
tgtgacaaagaagaccacatt

SEQ ID NO: 20855 - RNA, 21 nt, synthetic construct
  source 1..21: mol_type = other RNA; note = Description of Artificial Sequence: Synthetic oligonucleotide
gtgacaaagaagaccacaatt

SEQ ID NO: 20856 - RNA, 21 nt, synthetic construct
  source 1..21: mol_type = other RNA; note = Description of Artificial Sequence: Synthetic oligonucleotide
tgacaaagaagaccacaaatt

SEQ ID NO: 20857 - RNA, 21 nt, synthetic construct
  source 1..21: mol_type = other RNA; note = Description of Artificial Sequence: Synthetic oligonucleotide
gacaaagaagaccacaaaatt

SEQ ID NO: 20858 - RNA, 21 nt, synthetic construct
  source 1..21: mol_type = other RNA; note = Description of Artificial Sequence: Synthetic oligonucleotide
acaaagaagaccacaaatatt

SEQ ID NO: 20859 - RNA, 21 nt, synthetic construct
  source 1..21: mol_type = other RNA; note = Description of Artificial Sequence: Synthetic oligonucleotide
caaagaagaccacaaataatt

SEQ ID NO: 20860 - RNA, 21 nt, synthetic construct
  source 1..21: mol_type = other RNA; note = Description of Artificial Sequence: Synthetic oligonucleotide
aaagaagaccacaaatagatt

SEQ ID NO: 20861 - RNA, 21 nt, synthetic construct
  source 1..21: mol_type = other RNA; note = Description of Artificial Sequence: Synthetic oligonucleotide
aagaagaccacaaatagtatt

SEQ ID NO: 20862 - RNA, 21 nt, synthetic construct
  source 1..21: mol_type = other RNA; note = Description of Artificial Sequence: Synthetic oligonucleotide
agaagaccacaaatagttatt

SEQ ID NO: 20863 - RNA, 21 nt, synthetic construct
  source 1..21: mol_type = other RNA; note = Description of Artificial Sequence: Synthetic oligonucleotide
gaagaccacaaatagttaatt

SEQ ID NO: 20864 - RNA, 21 nt, synthetic construct
  source 1..21: mol_type = other RNA; note = Description of Artificial Sequence: Synthetic oligonucleotide
aagaccacaaatagttatatt

SEQ ID NO: 20865 - RNA, 21 nt, synthetic construct
  source 1..21: mol_type = other RNA; note = Description of Artificial Sequence: Synthetic oligonucleotide
agaccacaaatagttatcatt

SEQ ID NO: 20866 - RNA, 21 nt, synthetic construct
  source 1..21: mol_type = other RNA; note = Description of Artificial Sequence: Synthetic oligonucleotide
gaccacaaatagttatctatt

SEQ ID NO: 20867 - RNA, 21 nt, synthetic construct
  source 1..21: mol_type = other RNA; note = Description of Artificial Sequence: Synthetic oligonucleotide
accacaaatagttatcttatt

SEQ ID NO: 20868 - RNA, 21 nt, synthetic construct
  source 1..21: mol_type = other RNA; note = Description of Artificial Sequence: Synthetic oligonucleotide
ccacaaatagttatctttatt

SEQ ID NO: 20869 - RNA, 21 nt, synthetic construct
  source 1..21: mol_type = other RNA; note = Description of Artificial Sequence: Synthetic oligonucleotide
cacaaatagttatcttttatt

SEQ ID NO: 20870 - RNA, 21 nt, synthetic construct
  source 1..21: mol_type = other RNA; note = Description of Artificial Sequence: Synthetic oligonucleotide
acaaatagttatcttttaatt

SEQ ID NO: 20871 - RNA, 21 nt, synthetic construct
  source 1..21: mol_type = other RNA; note = Description of Artificial Sequence: Synthetic oligonucleotide
caaatagttatcttttaaatt

SEQ ID NO: 20872 - RNA, 21 nt, synthetic construct
  source 1..21: mol_type = other RNA; note = Description of Artificial Sequence: Synthetic oligonucleotide
aaatagttatcttttaatatt

SEQ ID NO: 20873 - RNA, 21 nt, synthetic construct
  source 1..21: mol_type = other RNA; note = Description of Artificial Sequence: Synthetic oligonucleotide
aatagttatcttttaattatt

SEQ ID NO: 20874 - RNA, 21 nt, synthetic construct
  source 1..21: mol_type = other RNA; note = Description of Artificial Sequence: Synthetic oligonucleotide
atagttatcttttaattaatt

SEQ ID NO: 20875 - RNA, 21 nt, synthetic construct
  source 1..21: mol_type = other RNA; note = Description of Artificial Sequence: Synthetic oligonucleotide
tagttatcttttaattacatt

SEQ ID NO: 20876 - RNA, 21 nt, synthetic construct
  source 1..21: mol_type = other RNA; note = Description of Artificial Sequence: Synthetic oligonucleotide
agttatcttttaattacaatt

SEQ ID NO: 20877 - RNA, 21 nt, synthetic construct
  source 1..21: mol_type = other RNA; note = Description of Artificial Sequence: Synthetic oligonucleotide
gttatcttttaattacagatt

SEQ ID NO: 20878 - RNA, 21 nt, synthetic construct
  source 1..21: mol_type = other RNA; note = Description of Artificial Sequence: Synthetic oligonucleotide
ttatcttttaattacagaatt

SEQ ID NO: 20879 - RNA, 21 nt, synthetic construct
  source 1..21: mol_type = other RNA; note = Description of Artificial Sequence: Synthetic oligonucleotide
tatcttttaattacagaaatt

SEQ ID NO: 20880 - RNA, 21 nt, synthetic construct
  source 1..21: mol_type = other RNA; note = Description of Artificial Sequence: Synthetic oligonucleotide
atcttttaattacagaagatt

SEQ ID NO: 20881 - RNA, 21 nt, synthetic construct
  source 1..21: mol_type = other RNA; note = Description of Artificial Sequence: Synthetic oligonucleotide
tcttttaattacagaagaatt

SEQ ID NO: 20882 - RNA, 21 nt, synthetic construct
  source 1..21: mol_type = other RNA; note = Description of Artificial Sequence: Synthetic oligonucleotide
cttttaattacagaagagatt

SEQ ID NO: 20883 - RNA, 21 nt, synthetic construct
  source 1..21: mol_type = other RNA; note = Description of Artificial Sequence: Synthetic oligonucleotide
ttttaattacagaagagtatt

SEQ ID NO: 20884 - RNA, 21 nt, synthetic construct
  source 1..21: mol_type = other RNA; note = Description of Artificial Sequence: Synthetic oligonucleotide
tttaattacagaagagttatt

SEQ ID NO: 20885 - RNA, 21 nt, synthetic construct
  source 1..21: mol_type = other RNA; note = Description of Artificial Sequence: Synthetic oligonucleotide
ttaattacagaagagtttatt

SEQ ID NO: 20886 - RNA, 21 nt, synthetic construct
  source 1..21: mol_type = other RNA; note = Description of Artificial Sequence: Synthetic oligonucleotide
taattacagaagagtttcatt

SEQ ID NO: 20887 - RNA, 21 nt, synthetic construct
  source 1..21: mol_type = other RNA; note = Description of Artificial Sequence: Synthetic oligonucleotide
aattacagaagagtttctatt

SEQ ID NO: 20888 - RNA, 21 nt, synthetic construct
  source 1..21: mol_type = other RNA; note = Description of Artificial Sequence: Synthetic oligonucleotide
attacagaagagtttcttatt

SEQ ID NO: 20889 - RNA, 21 nt, synthetic construct
  source 1..21: mol_type = other RNA; note = Description of Artificial Sequence: Synthetic oligonucleotide
ttacagaagagtttcttaatt

SEQ ID NO: 20890 - RNA, 21 nt, synthetic construct
  source 1..21: mol_type = other RNA; note = Description of Artificial Sequence: Synthetic oligonucleotide
tacagaagagtttcttaaatt

SEQ ID NO: 20891 - RNA, 21 nt, synthetic construct
  source 1..21: mol_type = other RNA; note = Description of Artificial Sequence: Synthetic oligonucleotide
acagaagagtttcttaacatt

SEQ ID NO: 20892 - RNA, 21 nt, synthetic construct
  source 1..21: mol_type = other RNA; note = Description of Artificial Sequence: Synthetic oligonucleotide
cagaagagtttcttaactatt

SEQ ID NO: 20893 - RNA, 21 nt, synthetic construct
  source 1..21: mol_type = other RNA; note = Description of Artificial Sequence: Synthetic oligonucleotide
agaagagtttcttaacttatt

SEQ ID NO: 20894 - RNA, 21 nt, synthetic construct
  source 1..21: mol_type = other RNA; note = Description of Artificial Sequence: Synthetic oligonucleotide
gaagagtttcttaacttaatt

SEQ ID NO: 20895 - RNA, 21 nt, synthetic construct
  source 1..21: mol_type = other RNA; note = Description of Artificial Sequence: Synthetic oligonucleotide
aagagtttcttaacttacatt

SEQ ID NO: 20896 - RNA, 21 nt, synthetic construct
  source 1..21: mol_type = other RNA; note = Description of Artificial Sequence: Synthetic oligonucleotide
agagtttcttaacttactatt

SEQ ID NO: 20897 - RNA, 21 nt, synthetic construct
  source 1..21: mol_type = other RNA; note = Description of Artificial Sequence: Synthetic oligonucleotide
gagtttcttaacttacttatt

SEQ ID NO: 20898 - RNA, 21 nt, synthetic construct
  source 1..21: mol_type = other RNA; note = Description of Artificial Sequence: Synthetic oligonucleotide
agtttcttaacttactttatt

SEQ ID NO: 20899 - RNA, 21 nt, synthetic construct
  source 1..21: mol_type = other RNA; note = Description of Artificial Sequence: Synthetic oligonucleotide
gtttcttaacttacttttatt

SEQ ID NO: 20900 - RNA, 21 nt, synthetic construct
  source 1..21: mol_type = other RNA; note = Description of Artificial Sequence: Synthetic oligonucleotide
tttcttaacttacttttgatt

SEQ ID NO: 20901 - RNA, 21 nt, synthetic construct
  source 1..21: mol_type = other RNA; note = Description of Artificial Sequence: Synthetic oligonucleotide
ttcttaacttacttttgtatt

SEQ ID NO: 20902 - RNA, 21 nt, synthetic construct
  source 1..21: mol_type = other RNA; note = Description of Artificial Sequence: Synthetic oligonucleotide
tcttaacttacttttgtaatt

SEQ ID NO: 20903 - RNA, 21 nt, synthetic construct
  source 1..21: mol_type = other RNA; note = Description of Artificial Sequence: Synthetic oligonucleotide
cttaacttacttttgtaaatt

SEQ ID NO: 20904 - RNA, 21 nt, synthetic construct
  source 1..21: mol_type = other RNA; note = Description of Artificial Sequence: Synthetic oligonucleotide
ttaacttacttttgtaagatt

SEQ ID NO: 20905 - RNA, 21 nt, synthetic construct
  source 1..21: mol_type = other RNA; note = Description of Artificial Sequence: Synthetic oligonucleotide
taacttacttttgtaagtatt

SEQ ID NO: 20906 - RNA, 21 nt, synthetic construct
  source 1..21: mol_type = other RNA; note = Description of Artificial Sequence: Synthetic oligonucleotide
aacttacttttgtaagttatt

SEQ ID NO: 20907 - RNA, 21 nt, synthetic construct
  source 1..21: mol_type = other RNA; note = Description of Artificial Sequence: Synthetic oligonucleotide
acttacttttgtaagtttatt

SEQ ID NO: 20908 - RNA, 21 nt, synthetic construct
  source 1..21: mol_type = other RNA; note = Description of Artificial Sequence: Synthetic oligonucleotide
cttacttttgtaagttttatt

SEQ ID NO: 20909 - RNA, 21 nt, synthetic construct
  source 1..21: mol_type = other RNA; note = Description of Artificial Sequence: Synthetic oligonucleotide
ttacttttgtaagtttttatt

SEQ ID NO: 20910 - RNA, 21 nt, synthetic construct
  source 1..21: mol_type = other RNA; note = Description of Artificial Sequence: Synthetic oligonucleotide
tacttttgtaagtttttaatt

SEQ ID NO: 20911 - RNA, 21 nt, synthetic construct
  source 1..21: mol_type = other RNA; note = Description of Artificial Sequence: Synthetic oligonucleotide
acttttgtaagtttttatatt

SEQ ID NO: 20912 - RNA, 21 nt, synthetic construct
  source 1..21: mol_type = other RNA; note = Description of Artificial Sequence: Synthetic oligonucleotide
cttttgtaagtttttattatt

SEQ ID NO: 20913 - RNA, 21 nt, synthetic construct
  source 1..21: mol_type = other RNA; note = Description of Artificial Sequence: Synthetic oligonucleotide
ttttgtaagtttttattgatt

SEQ ID NO: 20914 - RNA, 21 nt, synthetic construct
  source 1..21: mol_type = other RNA; note = Description of Artificial Sequence: Synthetic oligonucleotide
tttgtaagtttttattgtatt

SEQ ID NO: 20915 - RNA, 21 nt, synthetic construct
  source 1..21: mol_type = other RNA; note = Description of Artificial Sequence: Synthetic oligonucleotide
ttgtaagtttttattgtgatt

SEQ ID NO: 20916 - RNA, 21 nt, synthetic construct
  source 1..21: mol_type = other RNA; note = Description of Artificial Sequence: Synthetic oligonucleotide
tgtaagtttttattgtgtatt

SEQ ID NO: 20917 - RNA, 21 nt, synthetic construct
  source 1..21: mol_type = other RNA; note = Description of Artificial Sequence: Synthetic oligonucleotide
gtaagtttttattgtgtaatt

SEQ ID NO: 20918 - RNA, 21 nt, synthetic construct
  source 1..21: mol_type = other RNA; note = Description of Artificial Sequence: Synthetic oligonucleotide
taagtttttattgtgtaaatt

SEQ ID NO: 20919 - RNA, 21 nt, synthetic construct
  source 1..21: mol_type = other RNA; note = Description of Artificial Sequence: Synthetic oligonucleotide
aagtttttattgtgtaagatt

SEQ ID NO: 20920 - RNA, 21 nt, synthetic construct
  source 1..21: mol_type = other RNA; note = Description of Artificial Sequence: Synthetic oligonucleotide
agtttttattgtgtaagtatt

SEQ ID NO: 20921 - RNA, 21 nt, synthetic construct
  source 1..21: mol_type = other RNA; note = Description of Artificial Sequence: Synthetic oligonucleotide
gtttttattgtgtaagttatt

SEQ ID NO: 20922 - RNA, 21 nt, synthetic construct
  source 1..21: mol_type = other RNA; note = Description of Artificial Sequence: Synthetic oligonucleotide
tttttattgtgtaagtttatt

SEQ ID NO: 20923 - RNA, 21 nt, synthetic construct
  source 1..21: mol_type = other RNA; note = Description of Artificial Sequence: Synthetic oligonucleotide
ttttattgtgtaagtttaatt

SEQ ID NO: 20924 - RNA, 21 nt, synthetic construct
  source 1..21: mol_type = other RNA; note = Description of Artificial Sequence: Synthetic oligonucleotide
tttattgtgtaagtttatatt

SEQ ID NO: 20925 - RNA, 21 nt, synthetic construct
  source 1..21: mol_type = other RNA; note = Description of Artificial Sequence: Synthetic oligonucleotide
ttattgtgtaagtttataatt

SEQ ID NO: 20926 - RNA, 21 nt, synthetic construct
  source 1..21: mol_type = other RNA; note = Description of Artificial Sequence: Synthetic oligonucleotide
tattgtgtaagtttataaatt

SEQ ID NO: 20927 - RNA, 21 nt, synthetic construct
  source 1..21: mol_type = other RNA; note = Description of Artificial Sequence: Synthetic oligonucleotide
attgtgtaagtttataatatt

SEQ ID NO: 20928 - RNA, 21 nt, synthetic construct
  source 1..21: mol_type = other RNA; note = Description of Artificial Sequence: Synthetic oligonucleotide
ttgtgtaagtttataatgatt

SEQ ID NO: 20929 - RNA, 21 nt, synthetic construct
  source 1..21: mol_type = other RNA; note = Description of Artificial Sequence: Synthetic oligonucleotide
tgtgtaagtttataatgcatt

SEQ ID NO: 20930 - RNA, 21 nt, synthetic construct
  source 1..21: mol_type = other RNA; note = Description of Artificial Sequence: Synthetic oligonucleotide
gtgtaagtttataatgcaatt

SEQ ID NO: 20931 - RNA, 21 nt, synthetic construct
  source 1..21: mol_type = other RNA; note = Description of Artificial Sequence: Synthetic oligonucleotide
tgtaagtttataatgcagatt

SEQ ID NO: 20932 - RNA, 21 nt, synthetic construct
  source 1..21: mol_type = other RNA; note = Description of Artificial Sequence: Synthetic oligonucleotide
gtaagtttataatgcaggatt

SEQ ID NO: 20933 - RNA, 21 nt, synthetic construct
  source 1..21: mol_type = other RNA; note = Description of Artificial Sequence: Synthetic oligonucleotide
taagtttataatgcagggatt

SEQ ID NO: 20934 - RNA, 21 nt, synthetic construct
  source 1..21: mol_type = other RNA; note = Description of Artificial Sequence: Synthetic oligonucleotide
aagtttataatgcaggggatt

SEQ ID NO: 20935 - RNA, 21 nt, synthetic construct
  source 1..21: mol_type = other RNA; note = Description of Artificial Sequence: Synthetic oligonucleotide
agtttataatgcaggggaatt

SEQ ID NO: 20936 - RNA, 21 nt, synthetic construct
  source 1..21: mol_type = other RNA; note = Description of Artificial Sequence: Synthetic oligonucleotide
gtttataatgcaggggaaatt

SEQ ID NO: 20937 - RNA, 21 nt, synthetic construct
  source 1..21: mol_type = other RNA; note = Description of Artificial Sequence: Synthetic oligonucleotide
tttataatgcaggggaagatt

SEQ ID NO: 20938 - RNA, 21 nt, synthetic construct
  source 1..21: mol_type = other RNA; note = Description of Artificial Sequence: Synthetic oligonucleotide
ttataatgcaggggaagtatt

SEQ ID NO: 20939 - RNA, 21 nt, synthetic construct
  source 1..21: mol_type = other RNA; note = Description of Artificial Sequence: Synthetic oligonucleotide
tataatgcaggggaagtaatt

SEQ ID NO: 20940 - RNA, 21 nt, synthetic construct
  source 1..21: mol_type = other RNA; note = Description of Artificial Sequence: Synthetic oligonucleotide
ataatgcaggggaagtacatt

SEQ ID NO: 20941 - RNA, 21 nt, synthetic construct
  source 1..21: mol_type = other RNA; note = Description of Artificial Sequence: Synthetic oligonucleotide
taatgcaggggaagtactatt

SEQ ID NO: 20942 - RNA, 21 nt, synthetic construct
  source 1..21: mol_type = other RNA; note = Description of Artificial Sequence: Synthetic oligonucleotide
aatgcaggggaagtactaatt

SEQ ID NO: 20943 - RNA, 21 nt, synthetic construct
  source 1..21: mol_type = other RNA; note = Description of Artificial Sequence: Synthetic oligonucleotide
atgcaggggaagtactacatt

SEQ ID NO: 20944 - RNA, 21 nt, synthetic construct
  source 1..21: mol_type = other RNA; note = Description of Artificial Sequence: Synthetic oligonucleotide
tgcaggggaagtactactatt

SEQ ID NO: 20945 - RNA, 21 nt, synthetic construct
  source 1..21: mol_type = other RNA; note = Description of Artificial Sequence: Synthetic oligonucleotide
gcaggggaagtactactcatt

SEQ ID NO: 20946 - RNA, 21 nt, synthetic construct
  source 1..21: mol_type = other RNA; note = Description of Artificial Sequence: Synthetic oligonucleotide
caggggaagtactactccatt

SEQ ID NO: 20947 - RNA, 21 nt, synthetic construct
  source 1..21: mol_type = other RNA; note = Description of Artificial Sequence: Synthetic oligonucleotide
aggggaagtactactcctatt

SEQ ID NO: 20948 - RNA, 21 nt, synthetic construct
  source 1..21: mol_type = other RNA; note = Description of Artificial Sequence: Synthetic oligonucleotide
ggggaagtactactcctcatt

SEQ ID NO: 20949 - RNA, 21 nt, synthetic construct
  source 1..21: mol_type = other RNA; note = Description of Artificial Sequence: Synthetic oligonucleotide
gggaagtactactcctcaatt

SEQ ID NO: 20950 - RNA, 21 nt, synthetic construct
  source 1..21: mol_type = other RNA; note = Description of Artificial Sequence: Synthetic oligonucleotide
ggaagtactactcctcaaatt

SEQ ID NO: 20951 - RNA, 21 nt, synthetic construct
  source 1..21: mol_type = other RNA; note = Description of Artificial Sequence: Synthetic oligonucleotide
gaagtactactcctcaaaatt

SEQ ID NO: 20952 - RNA, 21 nt, synthetic construct
  source 1..21: mol_type = other RNA; note = Description of Artificial Sequence: Synthetic oligonucleotide
aagtactactcctcaaatatt

SEQ ID NO: 20953 - RNA, 21 nt, synthetic construct
  source 1..21: mol_type = other RNA; note = Description of Artificial Sequence: Synthetic oligonucleotide
agtactactcctcaaatgatt

SEQ ID NO: 20954 - RNA, 21 nt, synthetic construct
  source 1..21: mol_type = other RNA; note = Description of Artificial Sequence: Synthetic oligonucleotide
gtactactcctcaaatgtatt

SEQ ID NO: 20955 - RNA, 21 nt, synthetic construct
  source 1..21: mol_type = other RNA; note = Description of Artificial Sequence: Synthetic oligonucleotide
tactactcctcaaatgttatt

SEQ ID NO: 20956 - RNA, 21 nt, synthetic construct
  source 1..21: mol_type = other RNA; note = Description of Artificial Sequence: Synthetic oligonucleotide
actactcctcaaatgttgatt

SEQ ID NO: 20957 - RNA, 21 nt, synthetic construct
  source 1..21: mol_type = other RNA; note = Description of Artificial Sequence: Synthetic oligonucleotide
ctactcctcaaatgttgaatt

SEQ ID NO: 20958 - RNA, 21 nt, synthetic construct
  source 1..21: mol_type = other RNA; note = Description of Artificial Sequence: Synthetic oligonucleotide
tactcctcaaatgttgagatt

SEQ ID NO: 20959 - RNA, 21 nt, synthetic construct
  source 1..21: mol_type = other RNA; note = Description of Artificial Sequence: Synthetic oligonucleotide
actcctcaaatgttgaggatt

SEQ ID NO: 20960 - RNA, 21 nt, synthetic construct
  source 1..21: mol_type = other RNA; note = Description of Artificial Sequence: Synthetic oligonucleotide
ctcctcaaatgttgagggatt

SEQ ID NO: 20961 - RNA, 21 nt, synthetic construct
  source 1..21: mol_type = other RNA; note = Description of Artificial Sequence: Synthetic oligonucleotide
tcctcaaatgttgagggaatt

SEQ ID NO: 20962 - RNA, 21 nt, synthetic construct
  source 1..21: mol_type = other RNA; note = Description of Artificial Sequence: Synthetic oligonucleotide
cctcaaatgttgagggaaatt

SEQ ID NO: 20963 - RNA, 21 nt, synthetic construct
  source 1..21: mol_type = other RNA; note = Description of Artificial Sequence: Synthetic oligonucleotide
ctcaaatgttgagggaagatt

SEQ ID NO: 20964 - RNA, 21 nt, synthetic construct
  source 1..21: mol_type = other RNA; note = Description of Artificial Sequence: Synthetic oligonucleotide
tcaaatgttgagggaagcatt

SEQ ID NO: 20965 - RNA, 21 nt, synthetic construct
  source 1..21: mol_type = other RNA; note = Description of Artificial Sequence: Synthetic oligonucleotide
caaatgttgagggaagctatt

SEQ ID NO: 20966 - RNA, 21 nt, synthetic construct
  source 1..21: mol_type = other RNA; note = Description of Artificial Sequence: Synthetic oligonucleotide
aaatgttgagggaagcttatt

SEQ ID NO: 20967 - RNA, 21 nt, synthetic construct
  source 1..21: mol_type = other RNA; note = Description of Artificial Sequence: Synthetic oligonucleotide
aatgttgagggaagcttcatt

SEQ ID NO: 20968 - RNA, 21 nt, synthetic construct
  source 1..21: mol_type = other RNA; note = Description of Artificial Sequence: Synthetic oligonucleotide
atgttgagggaagcttccatt

SEQ ID NO: 20969 - RNA, 21 nt, synthetic construct
  source 1..21: mol_type = other RNA; note = Description of Artificial Sequence: Synthetic oligonucleotide
tgttgagggaagcttccaatt

SEQ ID NO: 20970 - RNA, 21 nt, synthetic construct
  source 1..21: mol_type = other RNA; note = Description of Artificial Sequence: Synthetic oligonucleotide
gttgagggaagcttccatatt

SEQ ID NO: 20971 - RNA, 21 nt, synthetic construct
  source 1..21: mol_type = other RNA; note = Description of Artificial Sequence: Synthetic oligonucleotide
ttgagggaagcttccataatt

SEQ ID NO: 20972 - RNA, 21 nt, synthetic construct
  source 1..21: mol_type = other RNA; note = Description of Artificial Sequence: Synthetic oligonucleotide
tgagggaagcttccataaatt

SEQ ID NO: 20973 - RNA, 21 nt, synthetic construct
  source 1..21: mol_type = other RNA; note = Description of Artificial Sequence: Synthetic oligonucleotide
gagggaagcttccataacatt

SEQ ID NO: 20974 - RNA, 21 nt, synthetic construct
  source 1..21: mol_type = other RNA; note = Description of Artificial Sequence: Synthetic oligonucleotide
agggaagcttccataacaatt

SEQ ID NO: 20975 - RNA, 21 nt, synthetic construct
  source 1..21: mol_type = other RNA; note = Description of Artificial Sequence: Synthetic oligonucleotide
gggaagcttccataacatatt

SEQ ID NO: 20976 - RNA, 21 nt, synthetic construct
  source 1..21: mol_type = other RNA; note = Description of Artificial Sequence: Synthetic oligonucleotide
ggaagcttccataacattatt

SEQ ID NO: 20977 - RNA, 21 nt, synthetic construct
  source 1..21: mol_type = other RNA; note = Description of Artificial Sequence: Synthetic oligonucleotide
gaagcttccataacattgatt

SEQ ID NO: 20978 - RNA, 21 nt, synthetic construct
  source 1..21: mol_type = other RNA; note = Description of Artificial Sequence: Synthetic oligonucleotide
aagcttccataacattgaatt

SEQ ID NO: 20979 - RNA, 21 nt, synthetic construct
  source 1..21: mol_type = other RNA; note = Description of Artificial Sequence: Synthetic oligonucleotide
agcttccataacattgatatt

SEQ ID NO: 20980 - RNA, 21 nt, synthetic construct
  source 1..21: mol_type = other RNA; note = Description of Artificial Sequence: Synthetic oligonucleotide
gcttccataacattgatgatt

SEQ ID NO: 20981 - RNA, 21 nt, synthetic construct
  source 1..21: mol_type = other RNA; note = Description of Artificial Sequence: Synthetic oligonucleotide
cttccataacattgatgaatt

SEQ ID NO: 20982 - RNA, 21 nt, synthetic construct
  source 1..21: mol_type = other RNA; note = Description of Artificial Sequence: Synthetic oligonucleotide
ttccataacattgatgacatt

SEQ ID NO: 20983 - RNA, 21 nt, synthetic construct
  source 1..21: mol_type = other RNA; note = Description of Artificial Sequence: Synthetic oligonucleotide
tccataacattgatgactatt

SEQ ID NO: 20984 - RNA, 21 nt, synthetic construct
  source 1..21: mol_type = other RNA; note = Description of Artificial Sequence: Synthetic oligonucleotide
ccataacattgatgactgatt

SEQ ID NO: 20985 - RNA, 21 nt, synthetic construct
  source 1..21: mol_type = other RNA; note = Description of Artificial Sequence: Synthetic oligonucleotide
cataacattgatgactggatt

SEQ ID NO: 20986 - RNA, 21 nt, synthetic construct
  source 1..21: mol_type = other RNA; note = Description of Artificial Sequence: Synthetic oligonucleotide
ataacattgatgactggcatt

SEQ ID NO: 20987 - RNA, 21 nt, synthetic construct
  source 1..21: mol_type = other RNA; note = Description of Artificial Sequence: Synthetic oligonucleotide
taacattgatgactggctatt

SEQ ID NO: 20988 - RNA, 21 nt, synthetic construct
  source 1..21: mol_type = other RNA; note = Description of Artificial Sequence: Synthetic oligonucleotide
aacattgatgactggcttatt

SEQ ID NO: 20989 - RNA, 21 nt, synthetic construct
  source 1..21: mol_type = other RNA; note = Description of Artificial Sequence: Synthetic oligonucleotide
acattgatgactggcttcatt

SEQ ID NO: 20990 - RNA, 21 nt, synthetic construct
  source 1..21: mol_type = other RNA; note = Description of Artificial Sequence: Synthetic oligonucleotide
cattgatgactggcttcaatt

SEQ ID NO: 20991 - RNA, 21 nt, synthetic construct
  source 1..21: mol_type = other RNA; note = Description of Artificial Sequence: Synthetic oligonucleotide
attgatgactggcttcatatt

SEQ ID NO: 20992 - RNA, 21 nt, synthetic construct
  source 1..21: mol_type = other RNA; note = Description of Artificial Sequence: Synthetic oligonucleotide
ttgatgactggcttcatgatt

SEQ ID NO: 20993 - RNA, 21 nt, synthetic construct
  source 1..21: mol_type = other RNA; note = Description of Artificial Sequence: Synthetic oligonucleotide
tgatgactggcttcatggatt

SEQ ID NO: 20994 - RNA, 21 nt, synthetic construct
  source 1..21: mol_type = other RNA; note = Description of Artificial Sequence: Synthetic oligonucleotide
gatgactggcttcatggcatt

SEQ ID NO: 20995 - RNA, 21 nt, synthetic construct
  source 1..21: mol_type = other RNA; note = Description of Artificial Sequence: Synthetic oligonucleotide
atgactggcttcatggcaatt

SEQ ID NO: 20996 - RNA, 21 nt, synthetic construct
  source 1..21: mol_type = other RNA; note = Description of Artificial Sequence: Synthetic oligonucleotide
tgactggcttcatggcagatt

SEQ ID NO: 20997 - RNA, 21 nt, synthetic construct
  source 1..21: mol_type = other RNA; note = Description of Artificial Sequence: Synthetic oligonucleotide
gactggcttcatggcagtatt

SEQ ID NO: 20998 - RNA, 21 nt, synthetic construct
  source 1..21: mol_type = other RNA; note = Description of Artificial Sequence: Synthetic oligonucleotide
actggcttcatggcagtaatt

SEQ ID NO: 20999 - RNA, 21 nt, synthetic construct
  source 1..21: mol_type = other RNA; note = Description of Artificial Sequence: Synthetic oligonucleotide
ctggcttcatggcagtaaatt

SEQ ID NO: 21000 - RNA, 21 nt, synthetic construct
  source 1..21: mol_type = other RNA; note = Description of Artificial Sequence: Synthetic oligonucleotide
tggcttcatggcagtaatatt

SEQ ID NO: 21001 - RNA, 21 nt, synthetic construct
  source 1..21: mol_type = other RNA; note = Description of Artificial Sequence: Synthetic oligonucleotide
ggcttcatggcagtaattatt

SEQ ID NO: 21002 - RNA, 21 nt, synthetic construct
  source 1..21: mol_type = other RNA; note = Description of Artificial Sequence: Synthetic oligonucleotide
gcttcatggcagtaattcatt

SEQ ID NO: 21003 - RNA, 21 nt, synthetic construct
  source 1..21: mol_type = other RNA; note = Description of Artificial Sequence: Synthetic oligonucleotide
cttcatggcagtaattctatt

SEQ ID NO: 21004 - RNA, 21 nt, synthetic construct
  source 1..21: mol_type = other RNA; note = Description of Artificial Sequence: Synthetic oligonucleotide
ttcatggcagtaattctcatt

SEQ ID NO: 21005 - RNA, 21 nt, synthetic construct
  source 1..21: mol_type = other RNA; note = Description of Artificial Sequence: Synthetic oligonucleotide
tcatggcagtaattctcgatt

SEQ ID NO: 21006 - RNA, 21 nt, synthetic construct
  source 1..21: mol_type = other RNA; note = Description of Artificial Sequence: Synthetic oligonucleotide
catggcagtaattctcggatt

SEQ ID NO: 21007 - RNA, 21 nt, synthetic construct
  source 1..21: mol_type = other RNA; note = Description of Artificial Sequence: Synthetic oligonucleotide
atggcagtaattctcggcatt

SEQ ID NO: 21008 - RNA, 21 nt, synthetic construct
  source 1..21: mol_type = other RNA; note = Description of Artificial Sequence: Synthetic oligonucleotide
tggcagtaattctcggctatt

SEQ ID NO: 21009 - RNA, 21 nt, synthetic construct
  source 1..21: mol_type = other RNA; note = Description of Artificial Sequence: Synthetic oligonucleotide
ggcagtaattctcggctgatt

SEQ ID NO: 21010 - RNA, 21 nt, synthetic construct
  source 1..21: mol_type = other RNA; note = Description of Artificial Sequence: Synthetic oligonucleotide
gcagtaattctcggctgtatt

SEQ ID NO: 21011 - RNA, 21 nt, synthetic construct
  source 1..21: mol_type = other RNA; note = Description of Artificial Sequence: Synthetic oligonucleotide
cagtaattctcggctgtaatt

SEQ ID NO: 21012 - RNA, 21 nt, synthetic construct
  source 1..21: mol_type = other RNA; note = Description of Artificial Sequence: Synthetic oligonucleotide
agtaattctcggctgtagatt

SEQ ID NO: 21013 - RNA, 21 nt, synthetic construct
  source 1..21: mol_type = other RNA; note = Description of Artificial Sequence: Synthetic oligonucleotide
gtaattctcggctgtagtatt

SEQ ID NO: 21014 - RNA, 21 nt, synthetic construct
  source 1..21: mol_type = other RNA; note = Description of Artificial Sequence: Synthetic oligonucleotide
taattctcggctgtagttatt

SEQ ID NO: 21015 - RNA, 21 nt, synthetic construct
  source 1..21: mol_type = other RNA; note = Description of Artificial Sequence: Synthetic oligonucleotide
aattctcggctgtagttgatt

SEQ ID NO: 21016 - RNA, 21 nt, synthetic construct
  source 1..21: mol_type = other RNA; note = Description of Artificial Sequence: Synthetic oligonucleotide
attctcggctgtagttgcatt

SEQ ID NO: 21017 - RNA, 21 nt, synthetic construct
  source 1..21: mol_type = other RNA; note = Description of Artificial Sequence: Synthetic oligonucleotide
ttctcggctgtagttgcaatt

SEQ ID NO: 21018 - RNA, 21 nt, synthetic construct
  source 1..21: mol_type = other RNA; note = Description of Artificial Sequence: Synthetic oligonucleotide
tctcggctgtagttgcatatt

SEQ ID NO: 21019 - RNA, 21 nt, synthetic construct
  source 1..21: mol_type = other RNA; note = Description of Artificial Sequence: Synthetic oligonucleotide
ctcggctgtagttgcataatt

SEQ ID NO: 21020 - RNA, 21 nt, synthetic construct
  source 1..21: mol_type = other RNA; note = Description of Artificial Sequence: Synthetic oligonucleotide
tcggctgtagttgcataaatt

SEQ ID NO: 21021 - RNA, 21 nt, synthetic construct
  source 1..21: mol_type = other RNA; note = Description of Artificial Sequence: Synthetic oligonucleotide
cggctgtagttgcataagatt

SEQ ID NO: 21022 - RNA, 21 nt, synthetic construct
  source 1..21: mol_type = other RNA; note = Description of Artificial Sequence: Synthetic oligonucleotide
ggctgtagttgcataagcatt

SEQ ID NO: 21023 - RNA, 21 nt, synthetic construct
  source 1..21: mol_type = other RNA; note = Description of Artificial Sequence: Synthetic oligonucleotide
gctgtagttgcataagcaatt

SEQ ID NO: 21024 - RNA, 21 nt, synthetic construct
  source 1..21: mol_type = other RNA; note = Description of Artificial Sequence: Synthetic oligonucleotide
ctgtagttgcataagcatatt

SEQ ID NO: 21025 - RNA, 21 nt, synthetic construct
  source 1..21: mol_type = other RNA; note = Description of Artificial Sequence: Synthetic oligonucleotide
tgtagttgcataagcattatt

SEQ ID NO: 21026 - RNA, 21 nt, synthetic construct
  source 1..21: mol_type = other RNA; note = Description of Artificial Sequence: Synthetic oligonucleotide
gtagttgcataagcattgatt

SEQ ID NO: 21027 - RNA, 21 nt, synthetic construct
  source 1..21: mol_type = other RNA; note = Description of Artificial Sequence: Synthetic oligonucleotide
tagttgcataagcattgcatt

SEQ ID NO: 21028 - RNA, 21 nt, synthetic construct
  source 1..21: mol_type = other RNA; note = Description of Artificial Sequence: Synthetic oligonucleotide
agttgcataagcattgctatt

SEQ ID NO: 21029 - RNA, 21 nt, synthetic construct
  source 1..21: mol_type = other RNA; note = Description of Artificial Sequence: Synthetic oligonucleotide
gttgcataagcattgctcatt

SEQ ID NO: 21030 - RNA, 21 nt, synthetic construct
  source 1..21: mol_type = other RNA; note = Description of Artificial Sequence: Synthetic oligonucleotide
ttgcataagcattgctcaatt

SEQ ID NO: 21031 - RNA, 21 nt, synthetic construct
  source 1..21: mol_type = other RNA; note = Description of Artificial Sequence: Synthetic oligonucleotide
tgcataagcattgctcaaatt

SEQ ID NO: 21032 - RNA, 21 nt, synthetic construct
  source 1..21: mol_type = other RNA; note = Description of Artificial Sequence: Synthetic oligonucleotide
gcataagcattgctcaagatt

SEQ ID NO: 21033 - RNA, 21 nt, synthetic construct
  source 1..21: mol_type = other RNA; note = Description of Artificial Sequence: Synthetic oligonucleotide
cataagcattgctcaagaatt

SEQ ID NO: 21034 - RNA, 21 nt, synthetic construct
  source 1..21: mol_type = other RNA; note = Description of Artificial Sequence: Synthetic oligonucleotide
ataagcattgctcaagagatt

SEQ ID NO: 21035 - RNA, 21 nt, synthetic construct
  source 1..21: mol_type = other RNA; note = Description of Artificial Sequence: Synthetic oligonucleotide
taagcattgctcaagaggatt

SEQ ID NO: 21036 - RNA, 21 nt, synthetic construct
  source 1..21: mol_type = other RNA; note = Description of Artificial Sequence: Synthetic oligonucleotide
aagcattgctcaagaggaatt

SEQ ID NO: 21037 - RNA, 21 nt, synthetic construct
  source 1..21: mol_type = other RNA; note = Description of Artificial Sequence: Synthetic oligonucleotide
agcattgctcaagaggaaatt

SEQ ID NO: 21038 - RNA, 21 nt, synthetic construct
  source 1..21: mol_type = other RNA; note = Description of Artificial Sequence: Synthetic oligonucleotide
gcattgctcaagaggaaaatt

SEQ ID NO: 21039 - RNA, 21 nt, synthetic construct
  source 1..21: mol_type = other RNA; note = Description of Artificial Sequence: Synthetic oligonucleotide
cattgctcaagaggaaaaatt

SEQ ID NO: 21040 - RNA, 21 nt, synthetic construct
  source 1..21: mol_type = other RNA; note = Description of Artificial Sequence: Synthetic oligonucleotide
attgctcaagaggaaaatatt

SEQ ID NO: 21041 - RNA, 21 nt, synthetic construct
  source 1..21: mol_type = other RNA; note = Description of Artificial Sequence: Synthetic oligonucleotide
ttgctcaagaggaaaatcatt

SEQ ID NO: 21042 - RNA, 21 nt, synthetic construct
  source 1..21: mol_type = other RNA; note = Description of Artificial Sequence: Synthetic oligonucleotide
tgctcaagaggaaaatccatt

SEQ ID NO: 21043 - RNA, 21 nt, synthetic construct
  source 1..21: mol_type = other RNA; note = Description of Artificial Sequence: Synthetic oligonucleotide
gctcaagaggaaaatccaatt

SEQ ID NO: 21044 - RNA, 21 nt, synthetic construct
  source 1..21: mol_type = other RNA; note = Description of Artificial Sequence: Synthetic oligonucleotide
ctcaagaggaaaatccaaatt

SEQ ID NO: 21045 - RNA, 21 nt, synthetic construct
  source 1..21: mol_type = other RNA; note = Description of Artificial Sequence: Synthetic oligonucleotide
tcaagaggaaaatccaaaatt

SEQ ID NO: 21046 - RNA, 21 nt, synthetic construct
  source 1..21: mol_type = other RNA; note = Description of Artificial Sequence: Synthetic oligonucleotide
caagaggaaaatccaaaaatt

SEQ ID NO: 21047 - RNA, 21 nt, synthetic construct
  source 1..21: mol_type = other RNA; note = Description of Artificial Sequence: Synthetic oligonucleotide
aagaggaaaatccaaaagatt

SEQ ID NO: 21048 - RNA, 21 nt, synthetic construct
  source 1..21: mol_type = other RNA; note = Description of Artificial Sequence: Synthetic oligonucleotide
agaggaaaatccaaaagtatt

SEQ ID NO: 21049 - RNA, 21 nt, synthetic construct
  source 1..21: mol_type = other RNA; note = Description of Artificial Sequence: Synthetic oligonucleotide
gaggaaaatccaaaagtgatt

SEQ ID NO: 21050 - RNA, 21 nt, synthetic construct
  source 1..21: mol_type = other RNA; note = Description of Artificial Sequence: Synthetic oligonucleotide
aggaaaatccaaaagtgcatt

SEQ ID NO: 21051 - RNA, 21 nt, synthetic construct
  source 1..21: mol_type = other RNA; note = Description of Artificial Sequence: Synthetic oligonucleotide
ggaaaatccaaaagtgcaatt

SEQ ID NO: 21052 - RNA, 21 nt, synthetic construct
  source 1..21: mol_type = other RNA; note = Description of Artificial Sequence: Synthetic oligonucleotide
gaaaatccaaaagtgcagatt

SEQ ID NO: 21053 - RNA, 21 nt, synthetic construct
  source 1..21: mol_type = other RNA; note = Description of Artificial Sequence: Synthetic oligonucleotide
aaaatccaaaagtgcagcatt

SEQ ID NO: 21054 - RNA, 21 nt, synthetic construct
  source 1..21: mol_type = other RNA; note = Description of Artificial Sequence: Synthetic oligonucleotide
aaatccaaaagtgcagcaatt

SEQ ID NO: 21055 - RNA, 21 nt, synthetic construct
  source 1..21: mol_type = other RNA; note = Description of Artificial Sequence: Synthetic oligonucleotide
aatccaaaagtgcagcagatt

SEQ ID NO: 21056 - RNA, 21 nt, synthetic construct
  source 1..21: mol_type = other RNA; note = Description of Artificial Sequence: Synthetic oligonucleotide
atccaaaagtgcagcaggatt

SEQ ID NO: 21057 - RNA, 21 nt, synthetic construct
  source 1..21: mol_type = other RNA; note = Description of Artificial Sequence: Synthetic oligonucleotide
tccaaaagtgcagcaggaatt

SEQ ID NO: 21058 - RNA, 21 nt, synthetic construct
  source 1..21: mol_type = other RNA; note = Description of Artificial Sequence: Synthetic oligonucleotide
ccaaaagtgcagcaggagatt

SEQ ID NO: 21059 - RNA, 21 nt, synthetic construct
  source 1..21: mol_type = other RNA; note = Description of Artificial Sequence: Synthetic oligonucleotide
caaaagtgcagcaggagaatt

SEQ ID NO: 21060 - RNA, 21 nt, synthetic construct
  source 1..21: mol_type = other RNA; note = Description of Artificial Sequence: Synthetic oligonucleotide
aaaagtgcagcaggagaaatt

SEQ ID NO: 21061 - RNA, 21 nt, synthetic construct
  source 1..21: mol_type = other RNA; note = Description of Artificial Sequence: Synthetic oligonucleotide
aaagtgcagcaggagaacatt

SEQ ID NO: 21062 - RNA, 21 nt, synthetic construct
  source 1..21: mol_type = other RNA; note = Description of Artificial Sequence: Synthetic oligonucleotide
aagtgcagcaggagaactatt

SEQ ID NO: 21063 - RNA, 21 nt, synthetic construct
  source 1..21: mol_type = other RNA; note = Description of Artificial Sequence: Synthetic oligonucleotide
agtgcagcaggagaactcatt

SEQ ID NO: 21064 - RNA, 21 nt, synthetic construct
  source 1..21: mol_type = other RNA; note = Description of Artificial Sequence: Synthetic oligonucleotide
gtgcagcaggagaactctatt

SEQ ID NO: 21065 - RNA, 21 nt, synthetic construct
  source 1..21: mol_type = other RNA; note = Description of Artificial Sequence: Synthetic oligonucleotide
tgcagcaggagaactcttatt

SEQ ID NO: 21066 - RNA, 21 nt, synthetic construct
  source 1..21: mol_type = other RNA; note = Description of Artificial Sequence: Synthetic oligonucleotide
gcagcaggagaactctttatt

SEQ ID NO: 21067 - RNA, 21 nt, synthetic construct
  source 1..21: mol_type = other RNA; note = Description of Artificial Sequence: Synthetic oligonucleotide
cagcaggagaactcttttatt

SEQ ID NO: 21068 - RNA, 21 nt, synthetic construct
  source 1..21: mol_type = other RNA; note = Description of Artificial Sequence: Synthetic oligonucleotide
agcaggagaactcttttcatt

SEQ ID NO: 21069 - RNA, 21 nt, synthetic construct
  source 1..21: mol_type = other RNA; note = Description of Artificial Sequence: Synthetic oligonucleotide
gcaggagaactcttttccatt

SEQ ID NO: 21070 - RNA, 21 nt, synthetic construct
  source 1..21: mol_type = other RNA; note = Description of Artificial Sequence: Synthetic oligonucleotide
caggagaactcttttcccatt

SEQ ID NO: 21071 - RNA, 21 nt, synthetic construct
  source 1..21: mol_type = other RNA; note = Description of Artificial Sequence: Synthetic oligonucleotide
aggagaactcttttccctatt

SEQ ID NO: 21072 - RNA, 21 nt, synthetic construct
  source 1..21: mol_type = other RNA; note = Description of Artificial Sequence: Synthetic oligonucleotide
ggagaactcttttccctgatt

SEQ ID NO: 21073 - RNA, 21 nt, synthetic construct
  source 1..21: mol_type = other RNA; note = Description of Artificial Sequence: Synthetic oligonucleotide
gagaactcttttccctgaatt

SEQ ID NO: 21074 - RNA, 21 nt, synthetic construct
  source 1..21: mol_type = other RNA; note = Description of Artificial Sequence: Synthetic oligonucleotide
agaactcttttccctgaaatt

SEQ ID NO: 21075 - RNA, 21 nt, synthetic construct
  source 1..21: mol_type = other RNA; note = Description of Artificial Sequence: Synthetic oligonucleotide
gaactcttttccctgaaaatt

SEQ ID NO: 21076 - RNA, 21 nt, synthetic construct
  source 1..21: mol_type = other RNA; note = Description of Artificial Sequence: Synthetic oligonucleotide
aactcttttccctgaaaaatt

SEQ ID NO: 21077 - RNA, 21 nt, synthetic construct
  source 1..21: mol_type = other RNA; note = Description of Artificial Sequence: Synthetic oligonucleotide
actcttttccctgaaaaaatt

SEQ ID NO: 21078 - RNA, 21 nt, synthetic construct
  source 1..21: mol_type = other RNA; note = Description of Artificial Sequence: Synthetic oligonucleotide
ctcttttccctgaaaaagatt

SEQ ID NO: 21079 - RNA, 21 nt, synthetic construct
  source 1..21: mol_type = other RNA; note = Description of Artificial Sequence: Synthetic oligonucleotide
tcttttccctgaaaaaggatt

SEQ ID NO: 21080 - RNA, 21 nt, synthetic construct
  source 1..21: mol_type = other RNA; note = Description of Artificial Sequence: Synthetic oligonucleotide
cttttccctgaaaaaggaatt

SEQ ID NO: 21081 - RNA, 21 nt, synthetic construct
  source 1..21: mol_type = other RNA; note = Description of Artificial Sequence: Synthetic oligonucleotide
ttttccctgaaaaaggaaatt

SEQ ID NO: 21082 - RNA, 21 nt, synthetic construct
  source 1..21: mol_type = other RNA; note = Description of Artificial Sequence: Synthetic oligonucleotide
tttccctgaaaaaggaaaatt

SEQ ID NO: 21083 - RNA, 21 nt, synthetic construct
  source 1..21: mol_type = other RNA; note = Description of Artificial Sequence: Synthetic oligonucleotide
ttccctgaaaaaggaaaaatt

SEQ ID NO: 21084 - RNA, 21 nt, synthetic construct
  source 1..21: mol_type = other RNA; note = Description of Artificial Sequence: Synthetic oligonucleotide
tccctgaaaaaggaaaaaatt

SEQ ID NO: 21085 - RNA, 21 nt, synthetic construct
  source 1..21: mol_type = other RNA; note = Description of Artificial Sequence: Synthetic oligonucleotide
ccctgaaaaaggaaaaatatt

SEQ ID NO: 21086 - RNA, 21 nt, synthetic construct
  source 1..21: mol_type = other RNA; note = Description of Artificial Sequence: Synthetic oligonucleotide
cctgaaaaaggaaaaataatt

SEQ ID NO: 21087 - RNA, 21 nt, synthetic construct
  source 1..21: mol_type = other RNA; note = Description of Artificial Sequence: Synthetic oligonucleotide
ctgaaaaaggaaaaatatatt

SEQ ID NO: 21088 - RNA, 21 nt, synthetic construct
  source 1..21: mol_type = other RNA; note = Description of Artificial Sequence: Synthetic oligonucleotide
tgaaaaaggaaaaatattatt

SEQ ID NO: 21089 - RNA, 21 nt, synthetic construct
  source 1..21: mol_type = other RNA; note = Description of Artificial Sequence: Synthetic oligonucleotide
gaaaaaggaaaaatattgatt

SEQ ID NO: 21090 - RNA, 21 nt, synthetic construct
  source 1..21: mol_type = other RNA; note = Description of Artificial Sequence: Synthetic oligonucleotide
aaaaaggaaaaatattgaatt

SEQ ID NO: 21091 - RNA, 21 nt, synthetic construct
  source 1..21: mol_type = other RNA; note = Description of Artificial Sequence: Synthetic oligonucleotide
aaaaggaaaaatattgaaatt

SEQ ID NO: 21092 - RNA, 21 nt, synthetic construct
  source 1..21: mol_type = other RNA; note = Description of Artificial Sequence: Synthetic oligonucleotide
aaaggaaaaatattgaacatt

SEQ ID NO: 21093 - RNA, 21 nt, synthetic construct
  source 1..21: mol_type = other RNA; note = Description of Artificial Sequence: Synthetic oligonucleotide
aaggaaaaatattgaactatt

SEQ ID NO: 21094 - RNA, 21 nt, synthetic construct
  source 1..21: mol_type = other RNA; note = Description of Artificial Sequence: Synthetic oligonucleotide
aggaaaaatattgaactcatt

SEQ ID NO: 21095 - RNA, 21 nt, synthetic construct
  source 1..21: mol_type = other RNA; note = Description of Artificial Sequence: Synthetic oligonucleotide
ggaaaaatattgaactcaatt

SEQ ID NO: 21096 - RNA, 21 nt, synthetic construct
  source 1..21: mol_type = other RNA; note = Description of Artificial Sequence: Synthetic oligonucleotide
gaaaaatattgaactcaaatt

SEQ ID NO: 21097 - RNA, 21 nt, synthetic construct
  source 1..21: mol_type = other RNA; note = Description of Artificial Sequence: Synthetic oligonucleotide
aaaaatattgaactcaatatt

SEQ ID NO: 21098 - RNA, 21 nt, synthetic construct
  source 1..21: mol_type = other RNA; note = Description of Artificial Sequence: Synthetic oligonucleotide
aaaatattgaactcaatgatt

SEQ ID NO: 21099 - RNA, 21 nt, synthetic construct
  source 1..21: mol_type = other RNA; note = Description of Artificial Sequence: Synthetic oligonucleotide
aaatattgaactcaatgaatt

SEQ ID NO: 21100 - RNA, 21 nt, synthetic construct
  source 1..21: mol_type = other RNA; note = Description of Artificial Sequence: Synthetic oligonucleotide
aatattgaactcaatgatatt

SEQ ID NO: 21101 - RNA, 21 nt, synthetic construct
  source 1..21: mol_type = other RNA; note = Description of Artificial Sequence: Synthetic oligonucleotide
atattgaactcaatgataatt

SEQ ID NO: 21102 - RNA, 21 nt, synthetic construct
  source 1..21: mol_type = other RNA; note = Description of Artificial Sequence: Synthetic oligonucleotide
tattgaactcaatgatagatt

SEQ ID NO: 21103 - RNA, 21 nt, synthetic construct
  source 1..21: mol_type = other RNA; note = Description of Artificial Sequence: Synthetic oligonucleotide
attgaactcaatgatagcatt

SEQ ID NO: 21104 - RNA, 21 nt, synthetic construct
  source 1..21: mol_type = other RNA; note = Description of Artificial Sequence: Synthetic oligonucleotide
ttgaactcaatgatagcaatt

SEQ ID NO: 21105 - RNA, 21 nt, synthetic construct
  source 1..21: mol_type = other RNA; note = Description of Artificial Sequence: Synthetic oligonucleotide
tgaactcaatgatagcacatt

SEQ ID NO: 21106 - RNA, 21 nt, synthetic construct
  source 1..21: mol_type = other RNA; note = Description of Artificial Sequence: Synthetic oligonucleotide
gaactcaatgatagcaccatt

SEQ ID NO: 21107 - RNA, 21 nt, synthetic construct
  source 1..21: mol_type = other RNA; note = Description of Artificial Sequence: Synthetic oligonucleotide
aactcaatgatagcacctatt

SEQ ID NO: 21108 - RNA, 21 nt, synthetic construct
  source 1..21: mol_type = other RNA; note = Description of Artificial Sequence: Synthetic oligonucleotide
actcaatgatagcacctaatt

SEQ ID NO: 21109 - RNA, 21 nt, synthetic construct
  source 1..21: mol_type = other RNA; note = Description of Artificial Sequence: Synthetic oligonucleotide
ctcaatgatagcacctaaatt

SEQ ID NO: 21110 - RNA, 21 nt, synthetic construct
  source 1..21: mol_type = other RNA; note = Description of Artificial Sequence: Synthetic oligonucleotide
tcaatgatagcacctaaaatt

SEQ ID NO: 21111 - RNA, 21 nt, synthetic construct
  source 1..21: mol_type = other RNA; note = Description of Artificial Sequence: Synthetic oligonucleotide
caatgatagcacctaaacatt

SEQ ID NO: 21112 - RNA, 21 nt, synthetic construct
  source 1..21: mol_type = other RNA; note = Description of Artificial Sequence: Synthetic oligonucleotide
aatgatagcacctaaactatt

SEQ ID NO: 21113 - RNA, 21 nt, synthetic construct
  source 1..21: mol_type = other RNA; note = Description of Artificial Sequence: Synthetic oligonucleotide
atgatagcacctaaacttatt

SEQ ID NO: 21114 - RNA, 21 nt, synthetic construct
  source 1..21: mol_type = other RNA; note = Description of Artificial Sequence: Synthetic oligonucleotide
tgatagcacctaaacttaatt

SEQ ID NO: 21115 - RNA, 21 nt, synthetic construct
  source 1..21: mol_type = other RNA; note = Description of Artificial Sequence: Synthetic oligonucleotide
gatagcacctaaacttacatt

SEQ ID NO: 21116 - RNA, 21 nt, synthetic construct
  source 1..21: mol_type = other RNA; note = Description of Artificial Sequence: Synthetic oligonucleotide
atagcacctaaacttacaatt

SEQ ID NO: 21117 - RNA, 21 nt, synthetic construct
  source 1..21: mol_type = other RNA; note = Description of Artificial Sequence: Synthetic oligonucleotide
tagcacctaaacttacatatt

SEQ ID NO: 21118 - RNA, 21 nt, synthetic construct
  source 1..21: mol_type = other RNA; note = Description of Artificial Sequence: Synthetic oligonucleotide
agcacctaaacttacattatt

SEQ ID NO: 21119 - RNA, 21 nt, synthetic construct
  source 1..21: mol_type = other RNA; note = Description of Artificial Sequence: Synthetic oligonucleotide
gcacctaaacttacatttatt

SEQ ID NO: 21120 - RNA, 21 nt, synthetic construct
  source 1..21: mol_type = other RNA; note = Description of Artificial Sequence: Synthetic oligonucleotide
cacctaaacttacatttaatt

SEQ ID NO: 21121 - RNA, 21 nt, synthetic construct
  source 1..21: mol_type = other RNA; note = Description of Artificial Sequence: Synthetic oligonucleotide
acctaaacttacatttaaatt

SEQ ID NO: 21122 - RNA, 21 nt, synthetic construct
  source 1..21: mol_type = other RNA; note = Description of Artificial Sequence: Synthetic oligonucleotide
cctaaacttacatttaaaatt

SEQ ID NO: 21123 - RNA, 21 nt, synthetic construct
  source 1..21: mol_type = other RNA; note = Description of Artificial Sequence: Synthetic oligonucleotide
ctaaacttacatttaaaaatt

SEQ ID NO: 21124 - RNA, 21 nt, synthetic construct
  source 1..21: mol_type = other RNA; note = Description of Artificial Sequence: Synthetic oligonucleotide
taaacttacatttaaaagatt

SEQ ID NO: 21125 - RNA, 21 nt, synthetic construct
  source 1..21: mol_type = other RNA; note = Description of Artificial Sequence: Synthetic oligonucleotide
aaacttacatttaaaagaatt

SEQ ID NO: 21126 - RNA, 21 nt, synthetic construct
  source 1..21: mol_type = other RNA; note = Description of Artificial Sequence: Synthetic oligonucleotide
aacttacatttaaaagacatt

SEQ ID NO: 21127 - RNA, 21 nt, synthetic construct
  source 1..21: mol_type = other RNA; note = Description of Artificial Sequence: Synthetic oligonucleotide
acttacatttaaaagacaatt

SEQ ID NO: 21128 - RNA, 21 nt, synthetic construct
  source 1..21: mol_type = other RNA; note = Description of Artificial Sequence: Synthetic oligonucleotide
cttacatttaaaagacagatt

SEQ ID NO: 21129 - RNA, 21 nt, synthetic construct
  source 1..21: mol_type = other RNA; note = Description of Artificial Sequence: Synthetic oligonucleotide
ttacatttaaaagacagaatt

SEQ ID NO: 21130 - RNA, 21 nt, synthetic construct
  source 1..21: mol_type = other RNA; note = Description of Artificial Sequence: Synthetic oligonucleotide
tacatttaaaagacagacatt

SEQ ID NO: 21131 - RNA, 21 nt, synthetic construct
  source 1..21: mol_type = other RNA; note = Description of Artificial Sequence: Synthetic oligonucleotide
acatttaaaagacagacaatt

SEQ ID NO: 21132 - RNA, 21 nt, synthetic construct
  source 1..21: mol_type = other RNA; note = Description of Artificial Sequence: Synthetic oligonucleotide
catttaaaagacagacatatt

SEQ ID NO: 21133 - RNA, 21 nt, synthetic construct
  source 1..21: mol_type = other RNA; note = Description of Artificial Sequence: Synthetic oligonucleotide
atttaaaagacagacattatt

SEQ ID NO: 21134 - RNA, 21 nt, synthetic construct
  source 1..21: mol_type = other RNA; note = Description of Artificial Sequence: Synthetic oligonucleotide
tttaaaagacagacattcatt

SEQ ID NO: 21135 - RNA, 21 nt, synthetic construct
  source 1..21: mol_type = other RNA; note = Description of Artificial Sequence: Synthetic oligonucleotide
ttaaaagacagacattccatt

SEQ ID NO: 21136 - RNA, 21 nt, synthetic construct
  source 1..21: mol_type = other RNA; note = Description of Artificial Sequence: Synthetic oligonucleotide
taaaagacagacattcctatt

SEQ ID NO: 21137 - RNA, 21 nt, synthetic construct
  source 1..21: mol_type = other RNA; note = Description of Artificial Sequence: Synthetic oligonucleotide
aaaagacagacattccttatt

SEQ ID NO: 21138 - RNA, 21 nt, synthetic construct
  source 1..21: mol_type = other RNA; note = Description of Artificial Sequence: Synthetic oligonucleotide
aaagacagacattccttcatt

SEQ ID NO: 21139 - RNA, 21 nt, synthetic construct
  source 1..21: mol_type = other RNA; note = Description of Artificial Sequence: Synthetic oligonucleotide
aagacagacattccttctatt

SEQ ID NO: 21140 - RNA, 21 nt, synthetic construct
  source 1..21: mol_type = other RNA; note = Description of Artificial Sequence: Synthetic oligonucleotide
agacagacattccttctaatt

SEQ ID NO: 21141 - RNA, 21 nt, synthetic construct
  source 1..21: mol_type = other RNA; note = Description of Artificial Sequence: Synthetic oligonucleotide
gacagacattccttctacatt

SEQ ID NO: 21142 - RNA, 21 nt, synthetic construct
  source 1..21: mol_type = other RNA; note = Description of Artificial Sequence: Synthetic oligonucleotide
acagacattccttctacaatt

SEQ ID NO: 21143 - RNA, 21 nt, synthetic construct
  source 1..21: mol_type = other RNA; note = Description of Artificial Sequence: Synthetic oligonucleotide
cagacattccttctacatatt

SEQ ID NO: 21144 - RNA, 21 nt, synthetic construct
  source 1..21: mol_type = other RNA; note = Description of Artificial Sequence: Synthetic oligonucleotide
agacattccttctacatgatt

SEQ ID NO: 21145 - RNA, 21 nt, synthetic construct
  source 1..21: mol_type = other RNA; note = Description of Artificial Sequence: Synthetic oligonucleotide
gacattccttctacatgtatt

SEQ ID NO: 21146 - RNA, 21 nt, synthetic construct
  source 1..21: mol_type = other RNA; note = Description of Artificial Sequence: Synthetic oligonucleotide
acattccttctacatgtaatt

SEQ ID NO: 21147 - RNA, 21 nt, synthetic construct
  source 1..21: mol_type = other RNA; note = Description of Artificial Sequence: Synthetic oligonucleotide
cattccttctacatgtaaatt

SEQ ID NO: 21148 - RNA, 21 nt, synthetic construct
  source 1..21: mol_type = other RNA; note = Description of Artificial Sequence: Synthetic oligonucleotide
attccttctacatgtaatatt

SEQ ID NO: 21149 - RNA, 21 nt, synthetic construct
  source 1..21: mol_type = other RNA; note = Description of Artificial Sequence: Synthetic oligonucleotide
ttccttctacatgtaatgatt

SEQ ID NO: 21150 - RNA, 21 nt, synthetic construct
  source 1..21: mol_type = other RNA; note = Description of Artificial Sequence: Synthetic oligonucleotide
tccttctacatgtaatgaatt

SEQ ID NO: 21151 - RNA, 21 nt, synthetic construct
  source 1..21: mol_type = other RNA; note = Description of Artificial Sequence: Synthetic oligonucleotide
ccttctacatgtaatgacatt

SEQ ID NO: 21152 - RNA, 21 nt, synthetic construct
  source 1..21: mol_type = other RNA; note = Description of Artificial Sequence: Synthetic oligonucleotide
cttctacatgtaatgacaatt

SEQ ID NO: 21153 - RNA, 21 nt, synthetic construct
  source 1..21: mol_type = other RNA; note = Description of Artificial Sequence: Synthetic oligonucleotide
ttctacatgtaatgacacatt

SEQ ID NO: 21154 - RNA, 21 nt, synthetic construct
  source 1..21: mol_type = other RNA; note = Description of Artificial Sequence: Synthetic oligonucleotide
tctacatgtaatgacactatt

SEQ ID NO: 21155 - RNA, 21 nt, synthetic construct
  source 1..21: mol_type = other RNA; note = Description of Artificial Sequence: Synthetic oligonucleotide
ctacatgtaatgacacttatt

SEQ ID NO: 21156 - RNA, 21 nt, synthetic construct
  source 1..21: mol_type = other RNA; note = Description of Artificial Sequence: Synthetic oligonucleotide
tacatgtaatgacacttcatt

SEQ ID NO: 21157 - RNA, 21 nt, synthetic construct
  source 1..21: mol_type = other RNA; note = Description of Artificial Sequence: Synthetic oligonucleotide
acatgtaatgacacttctatt

SEQ ID NO: 21158 - RNA, 21 nt, synthetic construct
  source 1..21: mol_type = other RNA; note = Description of Artificial Sequence: Synthetic oligonucleotide
catgtaatgacacttcttatt

SEQ ID NO: 21159 - RNA, 21 nt, synthetic construct
  source 1..21: mol_type = other RNA; note = Description of Artificial Sequence: Synthetic oligonucleotide
atgtaatgacacttcttgatt

SEQ ID NO: 21160 - RNA, 21 nt, synthetic construct
  source 1..21: mol_type = other RNA; note = Description of Artificial Sequence: Synthetic oligonucleotide
tgtaatgacacttcttgtatt

SEQ ID NO: 21161 - RNA, 21 nt, synthetic construct
  source 1..21: mol_type = other RNA; note = Description of Artificial Sequence: Synthetic oligonucleotide
gtaatgacacttcttgtgatt

SEQ ID NO: 21162 - RNA, 21 nt, synthetic construct
  source 1..21: mol_type = other RNA; note = Description of Artificial Sequence: Synthetic oligonucleotide
taatgacacttcttgtgtatt

SEQ ID NO: 21163 - RNA, 21 nt, synthetic construct
  source 1..21: mol_type = other RNA; note = Description of Artificial Sequence: Synthetic oligonucleotide
aatgacacttcttgtgttatt

SEQ ID NO: 21164 - RNA, 21 nt, synthetic construct
  source 1..21: mol_type = other RNA; note = Description of Artificial Sequence: Synthetic oligonucleotide
atgacacttcttgtgttaatt

SEQ ID NO: 21165 - RNA, 21 nt, synthetic construct
  source 1..21: mol_type = other RNA; note = Description of Artificial Sequence: Synthetic oligonucleotide
tgacacttcttgtgttaaatt

SEQ ID NO: 21166 - RNA, 21 nt, synthetic construct
  source 1..21: mol_type = other RNA; note = Description of Artificial Sequence: Synthetic oligonucleotide
gacacttcttgtgttaaaatt

SEQ ID NO: 21167 - RNA, 21 nt, synthetic construct
  source 1..21: mol_type = other RNA; note = Description of Artificial Sequence: Synthetic oligonucleotide
acacttcttgtgttaaacatt

SEQ ID NO: 21168 - RNA, 21 nt, synthetic construct
  source 1..21: mol_type = other RNA; note = Description of Artificial Sequence: Synthetic oligonucleotide
cacttcttgtgttaaactatt

SEQ ID NO: 21169 - RNA, 21 nt, synthetic construct
  source 1..21: mol_type = other RNA; note = Description of Artificial Sequence: Synthetic oligonucleotide
acttcttgtgttaaactaatt

SEQ ID NO: 21170 - RNA, 21 nt, synthetic construct
  source 1..21: mol_type = other RNA; note = Description of Artificial Sequence: Synthetic oligonucleotide
cttcttgtgttaaactaaatt

SEQ ID NO: 21171 - RNA, 21 nt, synthetic construct
  source 1..21: mol_type = other RNA; note = Description of Artificial Sequence: Synthetic oligonucleotide
ttcttgtgttaaactaaaatt

SEQ ID NO: 21172 - RNA, 21 nt, synthetic construct
  source 1..21: mol_type = other RNA; note = Description of Artificial Sequence: Synthetic oligonucleotide
tcttgtgttaaactaaaaatt

SEQ ID NO: 21173 - RNA, 21 nt, synthetic construct
  source 1..21: mol_type = other RNA; note = Description of Artificial Sequence: Synthetic oligonucleotide
cttgtgttaaactaaaaaatt

SEQ ID NO: 21174 - RNA, 21 nt, synthetic construct
  source 1..21: mol_type = other RNA; note = Description of Artificial Sequence: Synthetic oligonucleotide
ttgtgttaaactaaaaatatt

SEQ ID NO: 21175 - RNA, 21 nt, synthetic construct
  source 1..21: mol_type = other RNA; note = Description of Artificial Sequence: Synthetic oligonucleotide
tgtgttaaactaaaaattatt

SEQ ID NO: 21176 - RNA, 21 nt, synthetic construct
  source 1..21: mol_type = other RNA; note = Description of Artificial Sequence: Synthetic oligonucleotide
gtgttaaactaaaaatttatt

SEQ ID NO: 21177 - RNA, 21 nt, synthetic construct
  source 1..21: mol_type = other RNA; note = Description of Artificial Sequence: Synthetic oligonucleotide
tgttaaactaaaaatttaatt

SEQ ID NO: 21178 - RNA, 21 nt, synthetic construct
  source 1..21: mol_type = other RNA; note = Description of Artificial Sequence: Synthetic oligonucleotide
gttaaactaaaaatttacatt

SEQ ID NO: 21179 - RNA, 21 nt, synthetic construct
  source 1..21: mol_type = other RNA; note = Description of Artificial Sequence: Synthetic oligonucleotide
ttaaactaaaaatttacaatt

SEQ ID NO: 21180 - RNA, 21 nt, synthetic construct
  source 1..21: mol_type = other RNA; note = Description of Artificial Sequence: Synthetic oligonucleotide
taaactaaaaatttacaaatt

SEQ ID NO: 21181 - RNA, 21 nt, synthetic construct
  source 1..21: mol_type = other RNA; note = Description of Artificial Sequence: Synthetic oligonucleotide
aaactaaaaatttacaagatt

SEQ ID NO: 21182 - RNA, 21 nt, synthetic construct
  source 1..21: mol_type = other RNA; note = Description of Artificial Sequence: Synthetic oligonucleotide
aactaaaaatttacaagaatt

SEQ ID NO: 21183 - RNA, 21 nt, synthetic construct
  source 1..21: mol_type = other RNA; note = Description of Artificial Sequence: Synthetic oligonucleotide
actaaaaatttacaagagatt

SEQ ID NO: 21184 - RNA, 21 nt, synthetic construct
  source 1..21: mol_type = other RNA; note = Description of Artificial Sequence: Synthetic oligonucleotide
ctaaaaatttacaagagaatt

SEQ ID NO: 21185 - RNA, 21 nt, synthetic construct
  source 1..21: mol_type = other RNA; note = Description of Artificial Sequence: Synthetic oligonucleotide
taaaaatttacaagagaaatt

SEQ ID NO: 21186 - RNA, 21 nt, synthetic construct
  source 1..21: mol_type = other RNA; note = Description of Artificial Sequence: Synthetic oligonucleotide
aaaaatttacaagagaagatt

SEQ ID NO: 21187 - RNA, 21 nt, synthetic construct
  source 1..21: mol_type = other RNA; note = Description of Artificial Sequence: Synthetic oligonucleotide
aaaatttacaagagaagaatt

SEQ ID NO: 21188 - RNA, 21 nt, synthetic construct
  source 1..21: mol_type = other RNA; note = Description of Artificial Sequence: Synthetic oligonucleotide
aaatttacaagagaagaaatt

SEQ ID NO: 21189 - RNA, 21 nt, synthetic construct
  source 1..21: mol_type = other RNA; note = Description of Artificial Sequence: Synthetic oligonucleotide
aatttacaagagaagaaaatt

SEQ ID NO: 21190 - RNA, 21 nt, synthetic construct
  source 1..21: mol_type = other RNA; note = Description of Artificial Sequence: Synthetic oligonucleotide
atttacaagagaagaaagatt

SEQ ID NO: 21191 - RNA, 21 nt, synthetic construct
  source 1..21: mol_type = other RNA; note = Description of Artificial Sequence: Synthetic oligonucleotide
tttacaagagaagaaagtatt

SEQ ID NO: 21192 - RNA, 21 nt, synthetic construct
  source 1..21: mol_type = other RNA; note = Description of Artificial Sequence: Synthetic oligonucleotide
ttacaagagaagaaagtgatt

SEQ ID NO: 21193 - RNA, 21 nt, synthetic construct
  source 1..21: mol_type = other RNA; note = Description of Artificial Sequence: Synthetic oligonucleotide
tacaagagaagaaagtgaatt

SEQ ID NO: 21194 - RNA, 21 nt, synthetic construct
  source 1..21: mol_type = other RNA; note = Description of Artificial Sequence: Synthetic oligonucleotide
acaagagaagaaagtgaaatt

SEQ ID NO: 21195 - RNA, 21 nt, synthetic construct
  source 1..21: mol_type = other RNA; note = Description of Artificial Sequence: Synthetic oligonucleotide
caagagaagaaagtgaaaatt

SEQ ID NO: 21196 - RNA, 21 nt, synthetic construct
  source 1..21: mol_type = other RNA; note = Description of Artificial Sequence: Synthetic oligonucleotide
aagagaagaaagtgaaagatt

SEQ ID NO: 21197 - RNA, 21 nt, synthetic construct
  source 1..21: mol_type = other RNA; note = Description of Artificial Sequence: Synthetic oligonucleotide
agagaagaaagtgaaagcatt

SEQ ID NO: 21198 - RNA, 21 nt, synthetic construct
  source 1..21: mol_type = other RNA; note = Description of Artificial Sequence: Synthetic oligonucleotide
gagaagaaagtgaaagcaatt

SEQ ID NO: 21199 - RNA, 21 nt, synthetic construct
  source 1..21: mol_type = other RNA; note = Description of Artificial Sequence: Synthetic oligonucleotide
agaagaaagtgaaagcaaatt

SEQ ID NO: 21200 - RNA, 21 nt, synthetic construct
  source 1..21: mol_type = other RNA; note = Description of Artificial Sequence: Synthetic oligonucleotide
gaagaaagtgaaagcaaaatt

SEQ ID NO: 21201 - RNA, 21 nt, synthetic construct
  source 1..21: mol_type = other RNA; note = Description of Artificial Sequence: Synthetic oligonucleotide
aagaaagtgaaagcaaatatt

SEQ ID NO: 21202 - RNA, 21 nt, synthetic construct
  source 1..21: mol_type = other RNA; note = Description of Artificial Sequence: Synthetic oligonucleotide
agaaagtgaaagcaaatgatt

SEQ ID NO: 21203 - RNA, 21 nt, synthetic construct
  source 1..21: mol_type = other RNA; note = Description of Artificial Sequence: Synthetic oligonucleotide
gaaagtgaaagcaaatggatt

SEQ ID NO: 21204 - RNA, 21 nt, synthetic construct
  source 1..21: mol_type = other RNA; note = Description of Artificial Sequence: Synthetic oligonucleotide
aaagtgaaagcaaatgggatt

SEQ ID NO: 21205 - RNA, 21 nt, synthetic construct
  source 1..21: mol_type = other RNA; note = Description of Artificial Sequence: Synthetic oligonucleotide
aagtgaaagcaaatggggatt

SEQ ID NO: 21206 - RNA, 21 nt, synthetic construct
  source 1..21: mol_type = other RNA; note = Description of Artificial Sequence: Synthetic oligonucleotide
agtgaaagcaaatggggtatt

SEQ ID NO: 21207 - RNA, 21 nt, synthetic construct
  source 1..21: mol_type = other RNA; note = Description of Artificial Sequence: Synthetic oligonucleotide
gtgaaagcaaatggggttatt

SEQ ID NO: 21208 - RNA, 21 nt, synthetic construct
  source 1..21: mol_type = other RNA; note = Description of Artificial Sequence: Synthetic oligonucleotide
tgaaagcaaatggggtttatt

SEQ ID NO: 21209 - RNA, 21 nt, synthetic construct
  source 1..21: mol_type = other RNA; note = Description of Artificial Sequence: Synthetic oligonucleotide
gaaagcaaatggggtttcatt

SEQ ID NO: 21210 - RNA, 21 nt, synthetic construct
  source 1..21: mol_type = other RNA; note = Description of Artificial Sequence: Synthetic oligonucleotide
aaagcaaatggggtttcaatt

SEQ ID NO: 21211 - RNA, 21 nt, synthetic construct
  source 1..21: mol_type = other RNA; note = Description of Artificial Sequence: Synthetic oligonucleotide
aagcaaatggggtttcacatt

SEQ ID NO: 21212 - RNA, 21 nt, synthetic construct
  source 1..21: mol_type = other RNA; note = Description of Artificial Sequence: Synthetic oligonucleotide
agcaaatggggtttcacaatt

SEQ ID NO: 21213 - RNA, 21 nt, synthetic construct
  source 1..21: mol_type = other RNA; note = Description of Artificial Sequence: Synthetic oligonucleotide
gcaaatggggtttcacaaatt

SEQ ID NO: 21214 - RNA, 21 nt, synthetic construct
  source 1..21: mol_type = other RNA; note = Description of Artificial Sequence: Synthetic oligonucleotide
caaatggggtttcacaaaatt

SEQ ID NO: 21215 - RNA, 21 nt, synthetic construct
  source 1..21: mol_type = other RNA; note = Description of Artificial Sequence: Synthetic oligonucleotide
aaatggggtttcacaaatatt

SEQ ID NO: 21216 - RNA, 21 nt, synthetic construct
  source 1..21: mol_type = other RNA; note = Description of Artificial Sequence: Synthetic oligonucleotide
aatggggtttcacaaataatt

SEQ ID NO: 21217 - RNA, 21 nt, synthetic construct
  source 1..21: mol_type = other RNA; note = Description of Artificial Sequence: Synthetic oligonucleotide
atggggtttcacaaatagatt

SEQ ID NO: 21218 - RNA, 21 nt, synthetic construct
  source 1..21: mol_type = other RNA; note = Description of Artificial Sequence: Synthetic oligonucleotide
tggggtttcacaaatagtatt

SEQ ID NO: 21219 - RNA, 21 nt, synthetic construct
  source 1..21: mol_type = other RNA; note = Description of Artificial Sequence: Synthetic oligonucleotide
ggggtttcacaaatagttatt

SEQ ID NO: 21220 - RNA, 21 nt, synthetic construct
  source 1..21: mol_type = other RNA; note = Description of Artificial Sequence: Synthetic oligonucleotide
gggtttcacaaatagttgatt

SEQ ID NO: 21221 - RNA, 21 nt, synthetic construct
  source 1..21: mol_type = other RNA; note = Description of Artificial Sequence: Synthetic oligonucleotide
ggtttcacaaatagttgtatt

SEQ ID NO: 21222 - RNA, 21 nt, synthetic construct
  source 1..21: mol_type = other RNA; note = Description of Artificial Sequence: Synthetic oligonucleotide
gtttcacaaatagttgtaatt

SEQ ID NO: 21223 - RNA, 21 nt, synthetic construct
  source 1..21: mol_type = other RNA; note = Description of Artificial Sequence: Synthetic oligonucleotide
tttcacaaatagttgtaaatt

SEQ ID NO: 21224 - RNA, 21 nt, synthetic construct
  source 1..21: mol_type = other RNA; note = Description of Artificial Sequence: Synthetic oligonucleotide
ttcacaaatagttgtaaaatt

SEQ ID NO: 21225 - RNA, 21 nt, synthetic construct
  source 1..21: mol_type = other RNA; note = Description of Artificial Sequence: Synthetic oligonucleotide
tcacaaatagttgtaaatatt

SEQ ID NO: 21226 - RNA, 21 nt, synthetic construct
  source 1..21: mol_type = other RNA; note = Description of Artificial Sequence: Synthetic oligonucleotide
cacaaatagttgtaaataatt

SEQ ID NO: 21227 - RNA, 21 nt, synthetic construct
  source 1..21: mol_type = other RNA; note = Description of Artificial Sequence: Synthetic oligonucleotide
acaaatagttgtaaatatatt

SEQ ID NO: 21228 - RNA, 21 nt, synthetic construct
  source 1..21: mol_type = other RNA; note = Description of Artificial Sequence: Synthetic oligonucleotide
caaatagttgtaaatataatt

SEQ ID NO: 21229 - RNA, 21 nt, synthetic construct
  source 1..21: mol_type = other RNA; note = Description of Artificial Sequence: Synthetic oligonucleotide
aaatagttgtaaatatagatt

SEQ ID NO: 21230 - RNA, 21 nt, synthetic construct
  source 1..21: mol_type = other RNA; note = Description of Artificial Sequence: Synthetic oligonucleotide
aatagttgtaaatatagtatt

SEQ ID NO: 21231 - RNA, 21 nt, synthetic construct
  source 1..21: mol_type = other RNA; note = Description of Artificial Sequence: Synthetic oligonucleotide
atagttgtaaatatagtgatt

SEQ ID NO: 21232 - RNA, 21 nt, synthetic construct
  source 1..21: mol_type = other RNA; note = Description of Artificial Sequence: Synthetic oligonucleotide
tagttgtaaatatagtgaatt

SEQ ID NO: 21233 - RNA, 21 nt, synthetic construct
  source 1..21: mol_type = other RNA; note = Description of Artificial Sequence: Synthetic oligonucleotide
agttgtaaatatagtgaaatt

SEQ ID NO: 21234 - RNA, 21 nt, synthetic construct
  source 1..21: mol_type = other RNA; note = Description of Artificial Sequence: Synthetic oligonucleotide
gttgtaaatatagtgaagatt

SEQ ID NO: 21235 - RNA, 21 nt, synthetic construct
  source 1..21: mol_type = other RNA; note = Description of Artificial Sequence: Synthetic oligonucleotide
ttgtaaatatagtgaagcatt

SEQ ID NO: 21236 - RNA, 21 nt, synthetic construct
  source 1..21: mol_type = other RNA; note = Description of Artificial Sequence: Synthetic oligonucleotide
tgtaaatatagtgaagcaatt

SEQ ID NO: 21237 - RNA, 21 nt, synthetic construct
  source 1..21: mol_type = other RNA; note = Description of Artificial Sequence: Synthetic oligonucleotide
gtaaatatagtgaagcaaatt

SEQ ID NO: 21238 - RNA, 21 nt, synthetic construct
  source 1..21: mol_type = other RNA; note = Description of Artificial Sequence: Synthetic oligonucleotide
taaatatagtgaagcaatatt

SEQ ID NO: 21239 - RNA, 21 nt, synthetic construct
  source 1..21: mol_type = other RNA; note = Description of Artificial Sequence: Synthetic oligonucleotide
aaatatagtgaagcaattatt

SEQ ID NO: 21240 - RNA, 21 nt, synthetic construct
  source 1..21: mol_type = other RNA; note = Description of Artificial Sequence: Synthetic oligonucleotide
aatatagtgaagcaatttatt

SEQ ID NO: 21241 - RNA, 21 nt, synthetic construct
  source 1..21: mol_type = other RNA; note = Description of Artificial Sequence: Synthetic oligonucleotide
atatagtgaagcaatttgatt

SEQ ID NO: 21242 - RNA, 21 nt, synthetic construct
  source 1..21: mol_type = other RNA; note = Description of Artificial Sequence: Synthetic oligonucleotide
tatagtgaagcaatttgaatt

SEQ ID NO: 21243 - RNA, 21 nt, synthetic construct
  source 1..21: mol_type = other RNA; note = Description of Artificial Sequence: Synthetic oligonucleotide
atagtgaagcaatttgaaatt

SEQ ID NO: 21244 - RNA, 21 nt, synthetic construct
  source 1..21: mol_type = other RNA; note = Description of Artificial Sequence: Synthetic oligonucleotide
tagtgaagcaatttgaaaatt

SEQ ID NO: 21245 - RNA, 21 nt, synthetic construct
  source 1..21: mol_type = other RNA; note = Description of Artificial Sequence: Synthetic oligonucleotide
agtgaagcaatttgaaatatt

SEQ ID NO: 21246 - RNA, 21 nt, synthetic construct
  source 1..21: mol_type = other RNA; note = Description of Artificial Sequence: Synthetic oligonucleotide
gtgaagcaatttgaaataatt

SEQ ID NO: 21247 - RNA, 21 nt, synthetic construct
  source 1..21: mol_type = other RNA; note = Description of Artificial Sequence: Synthetic oligonucleotide
tgaagcaatttgaaataaatt

SEQ ID NO: 21248 - RNA, 21 nt, synthetic construct
  source 1..21: mol_type = other RNA; note = Description of Artificial Sequence: Synthetic oligonucleotide
gaagcaatttgaaataatatt

SEQ ID NO: 21249 - RNA, 21 nt, synthetic construct
  source 1..21: mol_type = other RNA; note = Description of Artificial Sequence: Synthetic oligonucleotide
aagcaatttgaaataattatt

SEQ ID NO: 21250 - RNA, 21 nt, synthetic construct
  source 1..21: mol_type = other RNA; note = Description of Artificial Sequence: Synthetic oligonucleotide
agcaatttgaaataatttatt

SEQ ID NO: 21251 - RNA, 21 nt, synthetic construct
  source 1..21: mol_type = other RNA; note = Description of Artificial Sequence: Synthetic oligonucleotide
gcaatttgaaataattttatt

SEQ ID NO: 21252 - RNA, 21 nt, synthetic construct
  source 1..21: mol_type = other RNA; note = Description of Artificial Sequence: Synthetic oligonucleotide
caatttgaaataattttcatt

SEQ ID NO: 21253 - RNA, 21 nt, synthetic construct
  source 1..21: mol_type = other RNA; note = Description of Artificial Sequence: Synthetic oligonucleotide
aatttgaaataattttcaatt

SEQ ID NO: 21254 - RNA, 21 nt, synthetic construct
  source 1..21: mol_type = other RNA; note = Description of Artificial Sequence: Synthetic oligonucleotide
atttgaaataattttcaaatt

SEQ ID NO: 21255 - RNA, 21 nt, synthetic construct
  source 1..21: mol_type = other RNA; note = Description of Artificial Sequence: Synthetic oligonucleotide
tttgaaataattttcaagatt

SEQ ID NO: 21256 - RNA, 21 nt, synthetic construct
  source 1..21: mol_type = other RNA; note = Description of Artificial Sequence: Synthetic oligonucleotide
ttgaaataattttcaagcatt

SEQ ID NO: 21257 - RNA, 21 nt, synthetic construct
  source 1..21: mol_type = other RNA; note = Description of Artificial Sequence: Synthetic oligonucleotide
tgaaataattttcaagcaatt

SEQ ID NO: 21258 - RNA, 21 nt, synthetic construct
  source 1..21: mol_type = other RNA; note = Description of Artificial Sequence: Synthetic oligonucleotide
gaaataattttcaagcaaatt

SEQ ID NO: 21259 - RNA, 21 nt, synthetic construct
  source 1..21: mol_type = other RNA; note = Description of Artificial Sequence: Synthetic oligonucleotide
aaataattttcaagcaaaatt

SEQ ID NO: 21260 - RNA, 21 nt, synthetic construct
  source 1..21: mol_type = other RNA; note = Description of Artificial Sequence: Synthetic oligonucleotide
aataattttcaagcaaagatt

SEQ ID NO: 21261 - RNA, 21 nt, synthetic construct
  source 1..21: mol_type = other RNA; note = Description of Artificial Sequence: Synthetic oligonucleotide
ataattttcaagcaaagtatt

SEQ ID NO: 21262 - RNA, 21 nt, synthetic construct
  source 1..21: mol_type = other RNA; note = Description of Artificial Sequence: Synthetic oligonucleotide
taattttcaagcaaagtaatt

SEQ ID NO: 21263 - RNA, 21 nt, synthetic construct
  source 1..21: mol_type = other RNA; note = Description of Artificial Sequence: Synthetic oligonucleotide
aattttcaagcaaagtatatt

SEQ ID NO: 21264 - RNA, 21 nt, synthetic construct
  source 1..21: mol_type = other RNA; note = Description of Artificial Sequence: Synthetic oligonucleotide
attttcaagcaaagtattatt

SEQ ID NO: 21265 - RNA, 21 nt, synthetic construct
  source 1..21: mol_type = other RNA; note = Description of Artificial Sequence: Synthetic oligonucleotide
ttttcaagcaaagtattgatt

SEQ ID NO: 21266 - RNA, 21 nt, synthetic construct
  source 1..21: mol_type = other RNA; note = Description of Artificial Sequence: Synthetic oligonucleotide
tttcaagcaaagtattgtatt

SEQ ID NO: 21267 - RNA, 21 nt, synthetic construct
  source 1..21: mol_type = other RNA; note = Description of Artificial Sequence: Synthetic oligonucleotide
ttcaagcaaagtattgtgatt

SEQ ID NO: 21268 - RNA, 21 nt, synthetic construct
  source 1..21: mol_type = other RNA; note = Description of Artificial Sequence: Synthetic oligonucleotide
tcaagcaaagtattgtgaatt

SEQ ID NO: 21269 - RNA, 21 nt, synthetic construct
  source 1..21: mol_type = other RNA; note = Description of Artificial Sequence: Synthetic oligonucleotide
caagcaaagtattgtgaaatt

SEQ ID NO: 21270 - RNA, 21 nt, synthetic construct
  source 1..21: mol_type = other RNA; note = Description of Artificial Sequence: Synthetic oligonucleotide
aagcaaagtattgtgaaaatt

SEQ ID NO: 21271 - RNA, 21 nt, synthetic construct
  source 1..21: mol_type = other RNA; note = Description of Artificial Sequence: Synthetic oligonucleotide
agcaaagtattgtgaaagatt

SEQ ID NO: 21272 - RNA, 21 nt, synthetic construct
  source 1..21: mol_type = other RNA; note = Description of Artificial Sequence: Synthetic oligonucleotide
gcaaagtattgtgaaagtatt

SEQ ID NO: 21273 - RNA, 21 nt, synthetic construct
  source 1..21: mol_type = other RNA; note = Description of Artificial Sequence: Synthetic oligonucleotide
caaagtattgtgaaagtaatt

SEQ ID NO: 21274 - RNA, 21 nt, synthetic construct
  source 1..21: mol_type = other RNA; note = Description of Artificial Sequence: Synthetic oligonucleotide
aaagtattgtgaaagtatatt

SEQ ID NO: 21275 - RNA, 21 nt, synthetic construct
  source 1..21: mol_type = other RNA; note = Description of Artificial Sequence: Synthetic oligonucleotide
aagtattgtgaaagtattatt

SEQ ID NO: 21276 - RNA, 21 nt, synthetic construct
  source 1..21: mol_type = other RNA; note = Description of Artificial Sequence: Synthetic oligonucleotide
agtattgtgaaagtattcatt

SEQ ID NO: 21277 - RNA, 21 nt, synthetic construct
  source 1..21: mol_type = other RNA; note = Description of Artificial Sequence: Synthetic oligonucleotide
gtattgtgaaagtattctatt

SEQ ID NO: 21278 - RNA, 21 nt, synthetic construct
  source 1..21: mol_type = other RNA; note = Description of Artificial Sequence: Synthetic oligonucleotide
tattgtgaaagtattctaatt

SEQ ID NO: 21279 - RNA, 21 nt, synthetic construct
  source 1..21: mol_type = other RNA; note = Description of Artificial Sequence: Synthetic oligonucleotide
attgtgaaagtattctaaatt

SEQ ID NO: 21280 - RNA, 21 nt, synthetic construct
  source 1..21: mol_type = other RNA; note = Description of Artificial Sequence: Synthetic oligonucleotide
ttgtgaaagtattctaagatt

SEQ ID NO: 21281 - RNA, 21 nt, synthetic construct
  source 1..21: mol_type = other RNA; note = Description of Artificial Sequence: Synthetic oligonucleotide
tgtgaaagtattctaagcatt

SEQ ID NO: 21282 - RNA, 21 nt, synthetic construct
  source 1..21: mol_type = other RNA; note = Description of Artificial Sequence: Synthetic oligonucleotide
gtgaaagtattctaagccatt

SEQ ID NO: 21283 - RNA, 21 nt, synthetic construct
  source 1..21: mol_type = other RNA; note = Description of Artificial Sequence: Synthetic oligonucleotide
tgaaagtattctaagccaatt

SEQ ID NO: 21284 - RNA, 21 nt, synthetic construct
  source 1..21: mol_type = other RNA; note = Description of Artificial Sequence: Synthetic oligonucleotide
gaaagtattctaagccaaatt

SEQ ID NO: 21285 - RNA, 21 nt, synthetic construct
  source 1..21: mol_type = other RNA; note = Description of Artificial Sequence: Synthetic oligonucleotide
aaagtattctaagccaagatt

SEQ ID NO: 21286 - RNA, 21 nt, synthetic construct
  source 1..21: mol_type = other RNA; note = Description of Artificial Sequence: Synthetic oligonucleotide
aagtattctaagccaagtatt

SEQ ID NO: 21287 - RNA, 21 nt, synthetic construct
  source 1..21: mol_type = other RNA; note = Description of Artificial Sequence: Synthetic oligonucleotide
agtattctaagccaagttatt

SEQ ID NO: 21288 - RNA, 21 nt, synthetic construct
  source 1..21: mol_type = other RNA; note = Description of Artificial Sequence: Synthetic oligonucleotide
gtattctaagccaagtttatt

SEQ ID NO: 21289 - RNA, 21 nt, synthetic construct
  source 1..21: mol_type = other RNA; note = Description of Artificial Sequence: Synthetic oligonucleotide
tattctaagccaagttttatt

SEQ ID NO: 21290 - RNA, 21 nt, synthetic construct
  source 1..21: mol_type = other RNA; note = Description of Artificial Sequence: Synthetic oligonucleotide
attctaagccaagttttaatt

SEQ ID NO: 21291 - RNA, 21 nt, synthetic construct
  source 1..21: mol_type = other RNA; note = Description of Artificial Sequence: Synthetic oligonucleotide
ttctaagccaagttttaaatt

SEQ ID NO: 21292 - RNA, 21 nt, synthetic construct
  source 1..21: mol_type = other RNA; note = Description of Artificial Sequence: Synthetic oligonucleotide
tctaagccaagttttaaaatt

SEQ ID NO: 21293 - RNA, 21 nt, synthetic construct
  source 1..21: mol_type = other RNA; note = Description of Artificial Sequence: Synthetic oligonucleotide
ctaagccaagttttaaatatt

SEQ ID NO: 21294 - RNA, 21 nt, synthetic construct
  source 1..21: mol_type = other RNA; note = Description of Artificial Sequence: Synthetic oligonucleotide
taagccaagttttaaataatt

SEQ ID NO: 21295 - RNA, 21 nt, synthetic construct
  source 1..21: mol_type = other RNA; note = Description of Artificial Sequence: Synthetic oligonucleotide
aagccaagttttaaatatatt

SEQ ID NO: 21296 - RNA, 21 nt, synthetic construct
  source 1..21: mol_type = other RNA; note = Description of Artificial Sequence: Synthetic oligonucleotide
agccaagttttaaatattatt

SEQ ID NO: 21297 - RNA, 21 nt, synthetic construct
  source 1..21: mol_type = other RNA; note = Description of Artificial Sequence: Synthetic oligonucleotide
gccaagttttaaatattaatt

SEQ ID NO: 21298 - RNA, 21 nt, synthetic construct
  source 1..21: mol_type = other RNA; note = Description of Artificial Sequence: Synthetic oligonucleotide
ccaagttttaaatattatatt

SEQ ID NO: 21299 - RNA, 21 nt, synthetic construct
  source 1..21: mol_type = other RNA; note = Description of Artificial Sequence: Synthetic oligonucleotide
caagttttaaatattatcatt

SEQ ID NO: 21300 - RNA, 21 nt, synthetic construct
  source 1..21: mol_type = other RNA; note = Description of Artificial Sequence: Synthetic oligonucleotide
aagttttaaatattatctatt

SEQ ID NO: 21301 - RNA, 21 nt, synthetic construct
  source 1..21: mol_type = other RNA; note = Description of Artificial Sequence: Synthetic oligonucleotide
agttttaaatattatctaatt

SEQ ID NO: 21302 - RNA, 21 nt, synthetic construct
  source 1..21: mol_type = other RNA; note = Description of Artificial Sequence: Synthetic oligonucleotide
gttttaaatattatctaaatt

SEQ ID NO: 21303 - RNA, 21 nt, synthetic construct
  source 1..21: mol_type = other RNA; note = Description of Artificial Sequence: Synthetic oligonucleotide
ttttaaatattatctaacatt

SEQ ID NO: 21304 - RNA, 21 nt, synthetic construct
  source 1..21: mol_type = other RNA; note = Description of Artificial Sequence: Synthetic oligonucleotide
tttaaatattatctaacaatt

SEQ ID NO: 21305 - RNA, 21 nt, synthetic construct
  source 1..21: mol_type = other RNA; note = Description of Artificial Sequence: Synthetic oligonucleotide
ttaaatattatctaacagatt

SEQ ID NO: 21306 - RNA, 21 nt, synthetic construct
  source 1..21: mol_type = other RNA; note = Description of Artificial Sequence: Synthetic oligonucleotide
taaatattatctaacagaatt

SEQ ID NO: 21307 - RNA, 21 nt, synthetic construct
  source 1..21: mol_type = other RNA; note = Description of Artificial Sequence: Synthetic oligonucleotide
aaatattatctaacagacatt

SEQ ID NO: 21308 - RNA, 21 nt, synthetic construct
  source 1..21: mol_type = other RNA; note = Description of Artificial Sequence: Synthetic oligonucleotide
aatattatctaacagacaatt

SEQ ID NO: 21309 - RNA, 21 nt, synthetic construct
  source 1..21: mol_type = other RNA; note = Description of Artificial Sequence: Synthetic oligonucleotide
atattatctaacagacaaatt

SEQ ID NO: 21310 - RNA, 21 nt, synthetic construct
  source 1..21: mol_type = other RNA; note = Description of Artificial Sequence: Synthetic oligonucleotide
tattatctaacagacaagatt

SEQ ID NO: 21311 - RNA, 21 nt, synthetic construct
  source 1..21: mol_type = other RNA; note = Description of Artificial Sequence: Synthetic oligonucleotide
attatctaacagacaagaatt

SEQ ID NO: 21312 - RNA, 21 nt, synthetic construct
  source 1..21: mol_type = other RNA; note = Description of Artificial Sequence: Synthetic oligonucleotide
ttatctaacagacaagagatt

SEQ ID NO: 21313 - RNA, 21 nt, synthetic construct
  source 1..21: mol_type = other RNA; note = Description of Artificial Sequence: Synthetic oligonucleotide
tatctaacagacaagagtatt

SEQ ID NO: 21314 - RNA, 21 nt, synthetic construct
  source 1..21: mol_type = other RNA; note = Description of Artificial Sequence: Synthetic oligonucleotide
atctaacagacaagagtgatt

SEQ ID NO: 21315 - RNA, 21 nt, synthetic construct
  source 1..21: mol_type = other RNA; note = Description of Artificial Sequence: Synthetic oligonucleotide
tctaacagacaagagtggatt

SEQ ID NO: 21316 - RNA, 21 nt, synthetic construct
  source 1..21: mol_type = other RNA; note = Description of Artificial Sequence: Synthetic oligonucleotide
ctaacagacaagagtggtatt

SEQ ID NO: 21317 - RNA, 21 nt, synthetic construct
  source 1..21: mol_type = other RNA; note = Description of Artificial Sequence: Synthetic oligonucleotide
taacagacaagagtggtaatt

SEQ ID NO: 21318 - RNA, 21 nt, synthetic construct
  source 1..21: mol_type = other RNA; note = Description of Artificial Sequence: Synthetic oligonucleotide
aacagacaagagtggtatatt

SEQ ID NO: 21319 - RNA, 21 nt, synthetic construct
  source 1..21: mol_type = other RNA; note = Description of Artificial Sequence: Synthetic oligonucleotide
acagacaagagtggtataatt

SEQ ID NO: 21320 - RNA, 21 nt, synthetic construct
  source 1..21: mol_type = other RNA; note = Description of Artificial Sequence: Synthetic oligonucleotide
cagacaagagtggtatatatt

SEQ ID NO: 21321 - RNA, 21 nt, synthetic construct
  source 1..21: mol_type = other RNA; note = Description of Artificial Sequence: Synthetic oligonucleotide
agacaagagtggtatataatt

SEQ ID NO: 21322 - RNA, 21 nt, synthetic construct
  source 1..21: mol_type = other RNA; note = Description of Artificial Sequence: Synthetic oligonucleotide
gacaagagtggtatatacatt

SEQ ID NO: 21323 - RNA, 21 nt, synthetic construct
  source 1..21: mol_type = other RNA; note = Description of Artificial Sequence: Synthetic oligonucleotide
acaagagtggtatatacaatt

SEQ ID NO: 21324 - RNA, 21 nt, synthetic construct
  source 1..21: mol_type = other RNA; note = Description of Artificial Sequence: Synthetic oligonucleotide
caagagtggtatatacaaatt

SEQ ID NO: 21325 - RNA, 21 nt, synthetic construct
  source 1..21: mol_type = other RNA; note = Description of Artificial Sequence: Synthetic oligonucleotide
aagagtggtatatacaagatt

SEQ ID NO: 21326 - RNA, 21 nt, synthetic construct
  source 1..21: mol_type = other RNA; note = Description of Artificial Sequence: Synthetic oligonucleotide
agagtggtatatacaagtatt

SEQ ID NO: 21327 - RNA, 21 nt, synthetic construct
  source 1..21: mol_type = other RNA; note = Description of Artificial Sequence: Synthetic oligonucleotide
gagtggtatatacaagtaatt

SEQ ID NO: 21328 - RNA, 21 nt, synthetic construct
  source 1..21: mol_type = other RNA; note = Description of Artificial Sequence: Synthetic oligonucleotide
agtggtatatacaagtagatt

SEQ ID NO: 21329 - RNA, 21 nt, synthetic construct
  source 1..21: mol_type = other RNA; note = Description of Artificial Sequence: Synthetic oligonucleotide
gtggtatatacaagtagaatt

SEQ ID NO: 21330 - RNA, 21 nt, synthetic construct
  source 1..21: mol_type = other RNA; note = Description of Artificial Sequence: Synthetic oligonucleotide
tggtatatacaagtagatatt

SEQ ID NO: 21331 - RNA, 21 nt, synthetic construct
  source 1..21: mol_type = other RNA; note = Description of Artificial Sequence: Synthetic oligonucleotide
ggtatatacaagtagatcatt

SEQ ID NO: 21332 - RNA, 21 nt, synthetic construct
  source 1..21: mol_type = other RNA; note = Description of Artificial Sequence: Synthetic oligonucleotide
gtatatacaagtagatccatt

SEQ ID NO: 21333 - RNA, 21 nt, synthetic construct
  source 1..21: mol_type = other RNA; note = Description of Artificial Sequence: Synthetic oligonucleotide
tatatacaagtagatcctatt

SEQ ID NO: 21334 - RNA, 21 nt, synthetic construct
  source 1..21: mol_type = other RNA; note = Description of Artificial Sequence: Synthetic oligonucleotide
atatacaagtagatcctgatt

SEQ ID NO: 21335 - RNA, 21 nt, synthetic construct
  source 1..21: mol_type = other RNA; note = Description of Artificial Sequence: Synthetic oligonucleotide
tatacaagtagatcctgaatt

SEQ ID NO: 21336 - RNA, 21 nt, synthetic construct
  source 1..21: mol_type = other RNA; note = Description of Artificial Sequence: Synthetic oligonucleotide
atacaagtagatcctgagatt

SEQ ID NO: 21337 - RNA, 21 nt, synthetic construct
  source 1..21: mol_type = other RNA; note = Description of Artificial Sequence: Synthetic oligonucleotide
tacaagtagatcctgagaatt

SEQ ID NO: 21338 - RNA, 21 nt, synthetic construct
  source 1..21: mol_type = other RNA; note = Description of Artificial Sequence: Synthetic oligonucleotide
acaagtagatcctgagaaatt

SEQ ID NO: 21339 - RNA, 21 nt, synthetic construct
  source 1..21: mol_type = other RNA; note = Description of Artificial Sequence: Synthetic oligonucleotide
caagtagatcctgagaagatt

SEQ ID NO: 21340 - RNA, 21 nt, synthetic construct
  source 1..21: mol_type = other RNA; note = Description of Artificial Sequence: Synthetic oligonucleotide
aagtagatcctgagaagtatt

SEQ ID NO: 21341 - RNA, 21 nt, synthetic construct
  source 1..21: mol_type = other RNA; note = Description of Artificial Sequence: Synthetic oligonucleotide
agtagatcctgagaagtaatt

SEQ ID NO: 21342 - RNA, 21 nt, synthetic construct
  source 1..21: mol_type = other RNA; note = Description of Artificial Sequence: Synthetic oligonucleotide
gtagatcctgagaagtacatt

SEQ ID NO: 21343 - RNA, 21 nt, synthetic construct
  source 1..21: mol_type = other RNA; note = Description of Artificial Sequence: Synthetic oligonucleotide
tagatcctgagaagtaccatt

SEQ ID NO: 21344 - RNA, 21 nt, synthetic construct
  source 1..21: mol_type = other RNA; note = Description of Artificial Sequence: Synthetic oligonucleotide
agatcctgagaagtacctatt

SEQ ID NO: 21345 - RNA, 21 nt, synthetic construct
  source 1..21: mol_type = other RNA; note = Description of Artificial Sequence: Synthetic oligonucleotide
gatcctgagaagtaccttatt

SEQ ID NO: 21346 - RNA, 21 nt, synthetic construct
  source 1..21: mol_type = other RNA; note = Description of Artificial Sequence: Synthetic oligonucleotide
atcctgagaagtacctttatt

SEQ ID NO: 21347 - RNA, 21 nt, synthetic construct
  source 1..21: mol_type = other RNA; note = Description of Artificial Sequence: Synthetic oligonucleotide
tcctgagaagtacctttgatt

SEQ ID NO: 21348 - RNA, 21 nt, synthetic construct
  source 1..21: mol_type = other RNA; note = Description of Artificial Sequence: Synthetic oligonucleotide
cctgagaagtacctttgtatt

SEQ ID NO: 21349 - RNA, 21 nt, synthetic construct
  source 1..21: mol_type = other RNA; note = Description of Artificial Sequence: Synthetic oligonucleotide
ctgagaagtacctttgttatt

SEQ ID NO: 21350 - RNA, 21 nt, synthetic construct
  source 1..21: mol_type = other RNA; note = Description of Artificial Sequence: Synthetic oligonucleotide
tgagaagtacctttgttaatt

SEQ ID NO: 21351 - RNA, 21 nt, synthetic construct
  source 1..21: mol_type = other RNA; note = Description of Artificial Sequence: Synthetic oligonucleotide
gagaagtacctttgttacatt

SEQ ID NO: 21352 - RNA, 21 nt, synthetic construct
  source 1..21: mol_type = other RNA; note = Description of Artificial Sequence: Synthetic oligonucleotide
agaagtacctttgttacaatt

SEQ ID NO: 21353 - RNA, 21 nt, synthetic construct
  source 1..21: mol_type = other RNA; note = Description of Artificial Sequence: Synthetic oligonucleotide
gaagtacctttgttacagatt

SEQ ID NO: 21354 - RNA, 21 nt, synthetic construct
  source 1..21: mol_type = other RNA; note = Description of Artificial Sequence: Synthetic oligonucleotide
aagtacctttgttacagcatt

SEQ ID NO: 21355 - RNA, 21 nt, synthetic construct
  source 1..21: mol_type = other RNA; note = Description of Artificial Sequence: Synthetic oligonucleotide
agtacctttgttacagctatt

SEQ ID NO: 21356 - RNA, 21 nt, synthetic construct
  source 1..21: mol_type = other RNA; note = Description of Artificial Sequence: Synthetic oligonucleotide
gtacctttgttacagctaatt

SEQ ID NO: 21357 - RNA, 21 nt, synthetic construct
  source 1..21: mol_type = other RNA; note = Description of Artificial Sequence: Synthetic oligonucleotide
tacctttgttacagctacatt

SEQ ID NO: 21358 - RNA, 21 nt, synthetic construct
  source 1..21: mol_type = other RNA; note = Description of Artificial Sequence: Synthetic oligonucleotide
acctttgttacagctactatt

SEQ ID NO: 21359 - RNA, 21 nt, synthetic construct
  source 1..21: mol_type = other RNA; note = Description of Artificial Sequence: Synthetic oligonucleotide
cctttgttacagctactaatt

SEQ ID NO: 21360 - RNA, 21 nt, synthetic construct
  source 1..21: mol_type = other RNA; note = Description of Artificial Sequence: Synthetic oligonucleotide
ctttgttacagctactatatt

SEQ ID NO: 21361 - RNA, 21 nt, synthetic construct
  source 1..21: mol_type = other RNA; note = Description of Artificial Sequence: Synthetic oligonucleotide
tttgttacagctactataatt

SEQ ID NO: 21362 - RNA, 21 nt, synthetic construct
  source 1..21: mol_type = other RNA; note = Description of Artificial Sequence: Synthetic oligonucleotide
ttgttacagctactataaatt

SEQ ID NO: 21363 - RNA, 21 nt, synthetic construct
  source 1..21: mol_type = other RNA; note = Description of Artificial Sequence: Synthetic oligonucleotide
tgttacagctactataaaatt

SEQ ID NO: 21364 - RNA, 21 nt, synthetic construct
  source 1..21: mol_type = other RNA; note = Description of Artificial Sequence: Synthetic oligonucleotide
gttacagctactataaatatt

SEQ ID NO: 21365 - RNA, 21 nt, synthetic construct
  source 1..21: mol_type = other RNA; note = Description of Artificial Sequence: Synthetic oligonucleotide
ttacagctactataaataatt

SEQ ID NO: 21366 - RNA, 21 nt, synthetic construct
  source 1..21: mol_type = other RNA; note = Description of Artificial Sequence: Synthetic oligonucleotide
tacagctactataaatatatt

SEQ ID NO: 21367 - RNA, 21 nt, synthetic construct
  source 1..21: mol_type = other RNA; note = Description of Artificial Sequence: Synthetic oligonucleotide
acagctactataaatataatt

SEQ ID NO: 21368 - RNA, 21 nt, synthetic construct
  source 1..21: mol_type = other RNA; note = Description of Artificial Sequence: Synthetic oligonucleotide
cagctactataaatatacatt

SEQ ID NO: 21369 - RNA, 21 nt, synthetic construct
  source 1..21: mol_type = other RNA; note = Description of Artificial Sequence: Synthetic oligonucleotide
agctactataaatatacaatt

SEQ ID NO: 21370 - RNA, 21 nt, synthetic construct
  source 1..21: mol_type = other RNA; note = Description of Artificial Sequence: Synthetic oligonucleotide
gctactataaatatacatatt

SEQ ID NO: 21371 - RNA, 21 nt, synthetic construct
  source 1..21: mol_type = other RNA; note = Description of Artificial Sequence: Synthetic oligonucleotide
ctactataaatatacataatt

SEQ ID NO: 21372 - RNA, 21 nt, synthetic construct
  source 1..21: mol_type = other RNA; note = Description of Artificial Sequence: Synthetic oligonucleotide
tactataaatatacatatatt

SEQ ID NO: 21373 - RNA, 21 nt, synthetic construct
  source 1..21: mol_type = other RNA; note = Description of Artificial Sequence: Synthetic oligonucleotide
actataaatatacatataatt

SEQ ID NO: 21374 - RNA, 21 nt, synthetic construct
  source 1..21: mol_type = other RNA; note = Description of Artificial Sequence: Synthetic oligonucleotide
ctataaatatacatataaatt

SEQ ID NO: 21375 - RNA, 21 nt, synthetic construct
  source 1..21: mol_type = other RNA; note = Description of Artificial Sequence: Synthetic oligonucleotide
tataaatatacatataaaatt

SEQ ID NO: 21376 - RNA, 21 nt, synthetic construct
  source 1..21: mol_type = other RNA; note = Description of Artificial Sequence: Synthetic oligonucleotide
ataaatatacatataaatatt

SEQ ID NO: 21377 - RNA, 21 nt, synthetic construct
  source 1..21: mol_type = other RNA; note = Description of Artificial Sequence: Synthetic oligonucleotide
taaatatacatataaattatt

SEQ ID NO: 21378 - RNA, 21 nt, synthetic construct
  source 1..21: mol_type = other RNA; note = Description of Artificial Sequence: Synthetic oligonucleotide
aaatatacatataaattaatt

SEQ ID NO: 21379 - RNA, 21 nt, synthetic construct
  source 1..21: mol_type = other RNA; note = Description of Artificial Sequence: Synthetic oligonucleotide
aatatacatataaattatatt

SEQ ID NO: 21380 - RNA, 21 nt, synthetic construct
  source 1..21: mol_type = other RNA; note = Description of Artificial Sequence: Synthetic oligonucleotide
atatacatataaattataatt

SEQ ID NO: 21381 - RNA, 21 nt, synthetic construct
  source 1..21: mol_type = other RNA; note = Description of Artificial Sequence: Synthetic oligonucleotide
tatacatataaattatagatt

SEQ ID NO: 21382 - RNA, 21 nt, synthetic construct
  source 1..21: mol_type = other RNA; note = Description of Artificial Sequence: Synthetic oligonucleotide
atacatataaattatagaatt

SEQ ID NO: 21383 - RNA, 21 nt, synthetic construct
  source 1..21: mol_type = other RNA; note = Description of Artificial Sequence: Synthetic oligonucleotide
tacatataaattatagaaatt

SEQ ID NO: 21384 - RNA, 21 nt, synthetic construct
  source 1..21: mol_type = other RNA; note = Description of Artificial Sequence: Synthetic oligonucleotide
acatataaattatagaatatt

SEQ ID NO: 21385 - RNA, 21 nt, synthetic construct
  source 1..21: mol_type = other RNA; note = Description of Artificial Sequence: Synthetic oligonucleotide
catataaattatagaatcatt

SEQ ID NO: 21386 - RNA, 21 nt, synthetic construct
  source 1..21: mol_type = other RNA; note = Description of Artificial Sequence: Synthetic oligonucleotide
atataaattatagaatctatt

SEQ ID NO: 21387 - RNA, 21 nt, synthetic construct
  source 1..21: mol_type = other RNA; note = Description of Artificial Sequence: Synthetic oligonucleotide
tataaattatagaatctaatt

SEQ ID NO: 21388 - RNA, 21 nt, synthetic construct
  source 1..21: mol_type = other RNA; note = Description of Artificial Sequence: Synthetic oligonucleotide
ataaattatagaatctacatt

SEQ ID NO: 21389 - RNA, 21 nt, synthetic construct
  source 1..21: mol_type = other RNA; note = Description of Artificial Sequence: Synthetic oligonucleotide
taaattatagaatctactatt

SEQ ID NO: 21390 - RNA, 21 nt, synthetic construct
  source 1..21: mol_type = other RNA; note = Description of Artificial Sequence: Synthetic oligonucleotide
aaattatagaatctacttatt

SEQ ID NO: 21391 - RNA, 21 nt, synthetic construct
  source 1..21: mol_type = other RNA; note = Description of Artificial Sequence: Synthetic oligonucleotide
aattatagaatctactttatt

SEQ ID NO: 21392 - RNA, 21 nt, synthetic construct
  source 1..21: mol_type = other RNA; note = Description of Artificial Sequence: Synthetic oligonucleotide
attatagaatctactttaatt

SEQ ID NO: 21393 - RNA, 21 nt, synthetic construct
  source 1..21: mol_type = other RNA; note = Description of Artificial Sequence: Synthetic oligonucleotide
ttatagaatctactttaaatt

SEQ ID NO: 21394 - RNA, 21 nt, synthetic construct
  source 1..21: mol_type = other RNA; note = Description of Artificial Sequence: Synthetic oligonucleotide
tatagaatctactttaatatt

SEQ ID NO: 21395 - RNA, 21 nt, synthetic construct
  source 1..21: mol_type = other RNA; note = Description of Artificial Sequence: Synthetic oligonucleotide
atagaatctactttaattatt

SEQ ID NO: 21396 - RNA, 21 nt, synthetic construct
  source 1..21: mol_type = other RNA; note = Description of Artificial Sequence: Synthetic oligonucleotide
tagaatctactttaatttatt

SEQ ID NO: 21397 - RNA, 21 nt, synthetic construct
  source 1..21: mol_type = other RNA; note = Description of Artificial Sequence: Synthetic oligonucleotide
agaatctactttaatttaatt

SEQ ID NO: 21398 - RNA, 21 nt, synthetic construct
  source 1..21: mol_type = other RNA; note = Description of Artificial Sequence: Synthetic oligonucleotide
gaatctactttaatttatatt

SEQ ID NO: 21399 - RNA, 21 nt, synthetic construct
  source 1..21: mol_type = other RNA; note = Description of Artificial Sequence: Synthetic oligonucleotide
aatctactttaatttattatt

SEQ ID NO: 21400 - RNA, 21 nt, synthetic construct
  source 1..21: mol_type = other RNA; note = Description of Artificial Sequence: Synthetic oligonucleotide
atctactttaatttatttatt

SEQ ID NO: 21401 - RNA, 21 nt, synthetic construct
  source 1..21: mol_type = other RNA; note = Description of Artificial Sequence: Synthetic oligonucleotide
tctactttaatttattttatt

SEQ ID NO: 21402 - RNA, 21 nt, synthetic construct
  source 1..21: mol_type = other RNA; note = Description of Artificial Sequence: Synthetic oligonucleotide
ctactttaatttattttgatt

SEQ ID NO: 21403 - RNA, 21 nt, synthetic construct
  source 1..21: mol_type = other RNA; note = Description of Artificial Sequence: Synthetic oligonucleotide
tactttaatttattttgtatt

SEQ ID NO: 21404 - RNA, 21 nt, synthetic construct
  source 1..21: mol_type = other RNA; note = Description of Artificial Sequence: Synthetic oligonucleotide
actttaatttattttgtgatt

SEQ ID NO: 21405 - RNA, 21 nt, synthetic construct
  source 1..21: mol_type = other RNA; note = Description of Artificial Sequence: Synthetic oligonucleotide
ctttaatttattttgtgaatt

SEQ ID NO: 21406 - RNA, 21 nt, synthetic construct
  source 1..21: mol_type = other RNA; note = Description of Artificial Sequence: Synthetic oligonucleotide
tttaatttattttgtgaaatt

SEQ ID NO: 21407 - RNA, 21 nt, synthetic construct
  source 1..21: mol_type = other RNA; note = Description of Artificial Sequence: Synthetic oligonucleotide
ttaatttattttgtgaacatt

SEQ ID NO: 21408 - RNA, 21 nt, synthetic construct
  source 1..21: mol_type = other RNA; note = Description of Artificial Sequence: Synthetic oligonucleotide
taatttattttgtgaacaatt

SEQ ID NO: 21409 - RNA, 21 nt, synthetic construct
  source 1..21: mol_type = other RNA; note = Description of Artificial Sequence: Synthetic oligonucleotide
aatttattttgtgaacacatt

SEQ ID NO: 21410 - RNA, 21 nt, synthetic construct
  source 1..21: mol_type = other RNA; note = Description of Artificial Sequence: Synthetic oligonucleotide
atttattttgtgaacactatt

SEQ ID NO: 21411 - RNA, 21 nt, synthetic construct
  source 1..21: mol_type = other RNA; note = Description of Artificial Sequence: Synthetic oligonucleotide
tttattttgtgaacacttatt

SEQ ID NO: 21412 - RNA, 21 nt, synthetic construct
  source 1..21: mol_type = other RNA; note = Description of Artificial Sequence: Synthetic oligonucleotide
ttattttgtgaacactttatt

SEQ ID NO: 21413 - RNA, 21 nt, synthetic construct
  source 1..21: mol_type = other RNA; note = Description of Artificial Sequence: Synthetic oligonucleotide
tattttgtgaacacttttatt

SEQ ID NO: 21414 - RNA, 21 nt, synthetic construct
  source 1..21: mol_type = other RNA; note = Description of Artificial Sequence: Synthetic oligonucleotide
attttgtgaacacttttgatt

SEQ ID NO: 21415 - RNA, 21 nt, synthetic construct
  source 1..21: mol_type = other RNA; note = Description of Artificial Sequence: Synthetic oligonucleotide
ttttgtgaacacttttgaatt

SEQ ID NO: 21416 - RNA, 21 nt, synthetic construct
  source 1..21: mol_type = other RNA; note = Description of Artificial Sequence: Synthetic oligonucleotide
tttgtgaacacttttgaaatt

SEQ ID NO: 21417 - RNA, 21 nt, synthetic construct
  source 1..21: mol_type = other RNA; note = Description of Artificial Sequence: Synthetic oligonucleotide
ttgtgaacacttttgaaaatt

SEQ ID NO: 21418 - RNA, 21 nt, synthetic construct
  source 1..21: mol_type = other RNA; note = Description of Artificial Sequence: Synthetic oligonucleotide
tgtgaacacttttgaaaaatt

SEQ ID NO: 21419 - RNA, 21 nt, synthetic construct
  source 1..21: mol_type = other RNA; note = Description of Artificial Sequence: Synthetic oligonucleotide
gtgaacacttttgaaaatatt

SEQ ID NO: 21420 - RNA, 21 nt, synthetic construct
  source 1..21: mol_type = other RNA; note = Description of Artificial Sequence: Synthetic oligonucleotide
tgaacacttttgaaaatgatt

SEQ ID NO: 21421 - RNA, 21 nt, synthetic construct
  source 1..21: mol_type = other RNA; note = Description of Artificial Sequence: Synthetic oligonucleotide
gaacacttttgaaaatgtatt

SEQ ID NO: 21422 - RNA, 21 nt, synthetic construct
  source 1..21: mol_type = other RNA; note = Description of Artificial Sequence: Synthetic oligonucleotide
aacacttttgaaaatgtaatt

SEQ ID NO: 21423 - RNA, 21 nt, synthetic construct
  source 1..21: mol_type = other RNA; note = Description of Artificial Sequence: Synthetic oligonucleotide
acacttttgaaaatgtacatt

SEQ ID NO: 21424 - RNA, 21 nt, synthetic construct
  source 1..21: mol_type = other RNA; note = Description of Artificial Sequence: Synthetic oligonucleotide
cacttttgaaaatgtacaatt

SEQ ID NO: 21425 - RNA, 21 nt, synthetic construct
  source 1..21: mol_type = other RNA; note = Description of Artificial Sequence: Synthetic oligonucleotide
acttttgaaaatgtacatatt

SEQ ID NO: 21426 - RNA, 21 nt, synthetic construct
  source 1..21: mol_type = other RNA; note = Description of Artificial Sequence: Synthetic oligonucleotide
cttttgaaaatgtacatgatt

SEQ ID NO: 21427 - RNA, 21 nt, synthetic construct
  source 1..21: mol_type = other RNA; note = Description of Artificial Sequence: Synthetic oligonucleotide
ttttgaaaatgtacatgtatt

SEQ ID NO: 21428 - RNA, 21 nt, synthetic construct
  source 1..21: mol_type = other RNA; note = Description of Artificial Sequence: Synthetic oligonucleotide
tttgaaaatgtacatgttatt

SEQ ID NO: 21429 - RNA, 21 nt, synthetic construct
  source 1..21: mol_type = other RNA; note = Description of Artificial Sequence: Synthetic oligonucleotide
ttgaaaatgtacatgttcatt

SEQ ID NO: 21430 - RNA, 21 nt, synthetic construct
  source 1..21: mol_type = other RNA; note = Description of Artificial Sequence: Synthetic oligonucleotide
tgaaaatgtacatgttccatt

SEQ ID NO: 21431 - RNA, 21 nt, synthetic construct
  source 1..21: mol_type = other RNA; note = Description of Artificial Sequence: Synthetic oligonucleotide
gaaaatgtacatgttcctatt

SEQ ID NO: 21432 - RNA, 21 nt, synthetic construct
  source 1..21: mol_type = other RNA; note = Description of Artificial Sequence: Synthetic oligonucleotide
aaaatgtacatgttccttatt

SEQ ID NO: 21433 - RNA, 21 nt, synthetic construct
  source 1..21: mol_type = other RNA; note = Description of Artificial Sequence: Synthetic oligonucleotide
aaatgtacatgttcctttatt

SEQ ID NO: 21434 - RNA, 21 nt, synthetic construct
  source 1..21: mol_type = other RNA; note = Description of Artificial Sequence: Synthetic oligonucleotide
aatgtacatgttcctttgatt

SEQ ID NO: 21435 - RNA, 21 nt, synthetic construct
  source 1..21: mol_type = other RNA; note = Description of Artificial Sequence: Synthetic oligonucleotide
atgtacatgttcctttgtatt

SEQ ID NO: 21436 - RNA, 21 nt, synthetic construct
  source 1..21: mol_type = other RNA; note = Description of Artificial Sequence: Synthetic oligonucleotide
tgtacatgttcctttgtaatt

SEQ ID NO: 21437 - RNA, 21 nt, synthetic construct
  source 1..21: mol_type = other RNA; note = Description of Artificial Sequence: Synthetic oligonucleotide
gtacatgttcctttgtaaatt

SEQ ID NO: 21438 - RNA, 21 nt, synthetic construct
  source 1..21: mol_type = other RNA; note = Description of Artificial Sequence: Synthetic oligonucleotide
tacatgttcctttgtaatatt

SEQ ID NO: 21439 - RNA, 21 nt, synthetic construct
  source 1..21: mol_type = other RNA; note = Description of Artificial Sequence: Synthetic oligonucleotide
acatgttcctttgtaattatt

SEQ ID NO: 21440 - RNA, 21 nt, synthetic construct
  source 1..21: mol_type = other RNA; note = Description of Artificial Sequence: Synthetic oligonucleotide
catgttcctttgtaattgatt

SEQ ID NO: 21441 - RNA, 21 nt, synthetic construct
  source 1..21: mol_type = other RNA; note = Description of Artificial Sequence: Synthetic oligonucleotide
atgttcctttgtaattgaatt

SEQ ID NO: 21442 - RNA, 21 nt, synthetic construct
  source 1..21: mol_type = other RNA; note = Description of Artificial Sequence: Synthetic oligonucleotide
tgttcctttgtaattgacatt

SEQ ID NO: 21443 - RNA, 21 nt, synthetic construct
  source 1..21: mol_type = other RNA; note = Description of Artificial Sequence: Synthetic oligonucleotide
gttcctttgtaattgacaatt

SEQ ID NO: 21444 - RNA, 21 nt, synthetic construct
  source 1..21: mol_type = other RNA; note = Description of Artificial Sequence: Synthetic oligonucleotide
ttcctttgtaattgacacatt

SEQ ID NO: 21445 - RNA, 21 nt, synthetic construct
  source 1..21: mol_type = other RNA; note = Description of Artificial Sequence: Synthetic oligonucleotide
tcctttgtaattgacactatt

SEQ ID NO: 21446 - RNA, 21 nt, synthetic construct
  source 1..21: mol_type = other RNA; note = Description of Artificial Sequence: Synthetic oligonucleotide
cctttgtaattgacactaatt

SEQ ID NO: 21447 - RNA, 21 nt, synthetic construct
  source 1..21: mol_type = other RNA; note = Description of Artificial Sequence: Synthetic oligonucleotide
ctttgtaattgacactatatt

SEQ ID NO: 21448 - RNA, 21 nt, synthetic construct
  source 1..21: mol_type = other RNA; note = Description of Artificial Sequence: Synthetic oligonucleotide
tttgtaattgacactataatt

SEQ ID NO: 21449 - RNA, 21 nt, synthetic construct
  source 1..21: mol_type = other RNA; note = Description of Artificial Sequence: Synthetic oligonucleotide
ttgtaattgacactatatatt

SEQ ID NO: 21450 - RNA, 21 nt, synthetic construct
  source 1..21: mol_type = other RNA; note = Description of Artificial Sequence: Synthetic oligonucleotide
tgtaattgacactatataatt

SEQ ID NO: 21451 - RNA, 21 nt, synthetic construct
  source 1..21: mol_type = other RNA; note = Description of Artificial Sequence: Synthetic oligonucleotide
gtaattgacactatatatatt

SEQ ID NO: 21452 - RNA, 21 nt, synthetic construct
  source 1..21: mol_type = other RNA; note = Description of Artificial Sequence: Synthetic oligonucleotide
taattgacactatatattatt

SEQ ID NO: 21453 - RNA, 21 nt, synthetic construct
  source 1..21: mol_type = other RNA; note = Description of Artificial Sequence: Synthetic oligonucleotide
aattgacactatatatttatt

SEQ ID NO: 21454 - RNA, 21 nt, synthetic construct
  source 1..21: mol_type = other RNA; note = Description of Artificial Sequence: Synthetic oligonucleotide
attgacactatatatttcatt

SEQ ID NO: 21455 - RNA, 21 nt, synthetic construct
  source 1..21: mol_type = other RNA; note = Description of Artificial Sequence: Synthetic oligonucleotide
ttgacactatatatttctatt

SEQ ID NO: 21456 - RNA, 21 nt, synthetic construct
  source 1..21: mol_type = other RNA; note = Description of Artificial Sequence: Synthetic oligonucleotide
tgacactatatatttcttatt

SEQ ID NO: 21457 - RNA, 21 nt, synthetic construct
  source 1..21: mol_type = other RNA; note = Description of Artificial Sequence: Synthetic oligonucleotide
gacactatatatttcttaatt

SEQ ID NO: 21458 - RNA, 21 nt, synthetic construct
  source 1..21: mol_type = other RNA; note = Description of Artificial Sequence: Synthetic oligonucleotide
acactatatatttcttaaatt

SEQ ID NO: 21459 - RNA, 21 nt, synthetic construct
  source 1..21: mol_type = other RNA; note = Description of Artificial Sequence: Synthetic oligonucleotide
cactatatatttcttaatatt

SEQ ID NO: 21460 - RNA, 21 nt, synthetic construct
  source 1..21: mol_type = other RNA; note = Description of Artificial Sequence: Synthetic oligonucleotide
actatatatttcttaataatt

SEQ ID NO: 21461 - RNA, 21 nt, synthetic construct
  source 1..21: mol_type = other RNA; note = Description of Artificial Sequence: Synthetic oligonucleotide
ctatatatttcttaataaatt

SEQ ID NO: 21462 - RNA, 21 nt, synthetic construct
  source 1..21: mol_type = other RNA; note = Description of Artificial Sequence: Synthetic oligonucleotide
tatatatttcttaataaaatt

SEQ ID NO: 21463 - RNA, 21 nt, synthetic construct
  source 1..21: mol_type = other RNA; note = Description of Artificial Sequence: Synthetic oligonucleotide
atatatttcttaataaaaatt

SEQ ID NO: 21464 - RNA, 21 nt, synthetic construct
  source 1..21: mol_type = other RNA; note = Description of Artificial Sequence: Synthetic oligonucleotide
tatatttcttaataaaatatt

SEQ ID NO: 21465 - RNA, 21 nt, synthetic construct
  source 1..21: mol_type = other RNA; note = Description of Artificial Sequence: Synthetic oligonucleotide
atatttcttaataaaataatt

SEQ ID NO: 21466 - RNA, 21 nt, synthetic construct
  source 1..21: mol_type = other RNA; note = Description of Artificial Sequence: Synthetic oligonucleotide
tatttcttaataaaataaatt

SEQ ID NO: 21467 - RNA, 21 nt, synthetic construct
  source 1..21: mol_type = other RNA; note = Description of Artificial Sequence: Synthetic oligonucleotide
atttcttaataaaataatatt

SEQ ID NO: 21468 - RNA, 21 nt, synthetic construct
  source 1..21: mol_type = other RNA; note = Description of Artificial Sequence: Synthetic oligonucleotide
tttcttaataaaataattatt

SEQ ID NO: 21469 - RNA, 21 nt, synthetic construct
  source 1..21: mol_type = other RNA; note = Description of Artificial Sequence: Synthetic oligonucleotide
ttcttaataaaataattcatt

SEQ ID NO: 21470 - RNA, 21 nt, synthetic construct
  source 1..21: mol_type = other RNA; note = Description of Artificial Sequence: Synthetic oligonucleotide
tcttaataaaataattctatt

SEQ ID NO: 21471 - RNA, 21 nt, synthetic construct
  source 1..21: mol_type = other RNA; note = Description of Artificial Sequence: Synthetic oligonucleotide
cttaataaaataattctcatt

SEQ ID NO: 21472 - RNA, 21 nt, synthetic construct
  source 1..21: mol_type = other RNA; note = Description of Artificial Sequence: Synthetic oligonucleotide
ttaataaaataattctcaatt

SEQ ID NO: 21473 - RNA, 21 nt, synthetic construct
  source 1..21: mol_type = other RNA; note = Description of Artificial Sequence: Synthetic oligonucleotide
taataaaataattctcaaatt

SEQ ID NO: 21474 - RNA, 21 nt, synthetic construct
  source 1..21: mol_type = other RNA; note = Description of Artificial Sequence: Synthetic oligonucleotide
aataaaataattctcaaaatt

SEQ ID NO: 21475 - RNA, 21 nt, synthetic construct
  source 1..21: mol_type = other RNA; note = Description of Artificial Sequence: Synthetic oligonucleotide
ataaaataattctcaaatatt

SEQ ID NO: 21476 - RNA, 21 nt, synthetic construct
  source 1..21: mol_type = other RNA; note = Description of Artificial Sequence: Synthetic oligonucleotide
taaaataattctcaaattatt

SEQ ID NO: 21477 - RNA, 21 nt, synthetic construct
  source 1..21: mol_type = other RNA; note = Description of Artificial Sequence: Synthetic oligonucleotide
aaaataattctcaaatttatt

SEQ ID NO: 21478 - RNA, 21 nt, synthetic construct
  source 1..21: mol_type = other RNA; note = Description of Artificial Sequence: Synthetic oligonucleotide
aaataattctcaaatttgatt

SEQ ID NO: 21479 - RNA, 21 nt, synthetic construct
  source 1..21: mol_type = other RNA; note = Description of Artificial Sequence: Synthetic oligonucleotide
aataattctcaaatttgtatt

SEQ ID NO: 21480 - RNA, 21 nt, synthetic construct
  source 1..21: mol_type = other RNA; note = Description of Artificial Sequence: Synthetic oligonucleotide
ataattctcaaatttgttatt

SEQ ID NO: 21481 - RNA, 21 nt, synthetic construct
  source 1..21: mol_type = other RNA; note = Description of Artificial Sequence: Synthetic oligonucleotide
taattctcaaatttgtttatt

SEQ ID NO: 21482 - RNA, 21 nt, synthetic construct
  source 1..21: mol_type = other RNA; note = Description of Artificial Sequence: Synthetic oligonucleotide
aattctcaaatttgtttcatt

SEQ ID NO: 21483 - RNA, 21 nt, synthetic construct
  source 1..21: mol_type = other RNA; note = Description of Artificial Sequence: Synthetic oligonucleotide
attctcaaatttgtttctatt

SEQ ID NO: 21484 - RNA, 21 nt, synthetic construct
  source 1..21: mol_type = other RNA; note = Description of Artificial Sequence: Synthetic oligonucleotide
ttctcaaatttgtttcttatt

SEQ ID NO: 21485 - RNA, 21 nt, synthetic construct
  source 1..21: mol_type = other RNA; note = Description of Artificial Sequence: Synthetic oligonucleotide
tctcaaatttgtttcttaatt

SEQ ID NO: 21486 - RNA, 21 nt, synthetic construct
  source 1..21: mol_type = other RNA; note = Description of Artificial Sequence: Synthetic oligonucleotide
ctcaaatttgtttcttatatt

SEQ ID NO: 21487 - RNA, 21 nt, synthetic construct
  source 1..21: mol_type = other RNA; note = Description of Artificial Sequence: Synthetic oligonucleotide
tcaaatttgtttcttatgatt

SEQ ID NO: 21488 - RNA, 21 nt, synthetic construct
  source 1..21: mol_type = other RNA; note = Description of Artificial Sequence: Synthetic oligonucleotide
caaatttgtttcttatgaatt

SEQ ID NO: 21489 - RNA, 21 nt, synthetic construct
  source 1..21: mol_type = other RNA; note = Description of Artificial Sequence: Synthetic oligonucleotide
aaatttgtttcttatgaaatt

SEQ ID NO: 21490 - RNA, 21 nt, synthetic construct
  source 1..21: mol_type = other RNA; note = Description of Artificial Sequence: Synthetic oligonucleotide
aatttgtttcttatgaatatt

SEQ ID NO: 21491 - RNA, 21 nt, synthetic construct
  source 1..21: mol_type = other RNA; note = Description of Artificial Sequence: Synthetic oligonucleotide
atttgtttcttatgaatcatt

SEQ ID NO: 21492 - RNA, 21 nt, synthetic construct
  source 1..21: mol_type = other RNA; note = Description of Artificial Sequence: Synthetic oligonucleotide
tttgtttcttatgaatcaatt

SEQ ID NO: 21493 - RNA, 21 nt, synthetic construct
  source 1..21: mol_type = other RNA; note = Description of Artificial Sequence: Synthetic oligonucleotide
ttgtttcttatgaatcatatt

SEQ ID NO: 21494 - RNA, 21 nt, synthetic construct
  source 1..21: mol_type = other RNA; note = Description of Artificial Sequence: Synthetic oligonucleotide
tgtttcttatgaatcatcatt

SEQ ID NO: 21495 - RNA, 21 nt, synthetic construct
  source 1..21: mol_type = other RNA; note = Description of Artificial Sequence: Synthetic oligonucleotide
gtttcttatgaatcatctatt

SEQ ID NO: 21496 - RNA, 21 nt, synthetic construct
  source 1..21: mol_type = other RNA; note = Description of Artificial Sequence: Synthetic oligonucleotide
tttcttatgaatcatctcatt

SEQ ID NO: 21497 - RNA, 21 nt, synthetic construct
  source 1..21: mol_type = other RNA; note = Description of Artificial Sequence: Synthetic oligonucleotide
ttcttatgaatcatctctatt

SEQ ID NO: 21498 - RNA, 21 nt, synthetic construct
  source 1..21: mol_type = other RNA; note = Description of Artificial Sequence: Synthetic oligonucleotide
tcttatgaatcatctctcatt

SEQ ID NO: 21499 - RNA, 21 nt, synthetic construct
  source 1..21: mol_type = other RNA; note = Description of Artificial Sequence: Synthetic oligonucleotide
cttatgaatcatctctcaatt

SEQ ID NO: 21500 - RNA, 21 nt, synthetic construct
  source 1..21: mol_type = other RNA; note = Description of Artificial Sequence: Synthetic oligonucleotide
ttatgaatcatctctcaaatt

SEQ ID NO: 21501 - RNA, 21 nt, synthetic construct
  source 1..21: mol_type = other RNA; note = Description of Artificial Sequence: Synthetic oligonucleotide
tatgaatcatctctcaaaatt

SEQ ID NO: 21502 - RNA, 21 nt, synthetic construct
  source 1..21: mol_type = other RNA; note = Description of Artificial Sequence: Synthetic oligonucleotide
atgaatcatctctcaaatatt

SEQ ID NO: 21503 - RNA, 21 nt, synthetic construct
  source 1..21: mol_type = other RNA; note = Description of Artificial Sequence: Synthetic oligonucleotide
tgaatcatctctcaaatcatt

SEQ ID NO: 21504 - RNA, 21 nt, synthetic construct
  source 1..21: mol_type = other RNA; note = Description of Artificial Sequence: Synthetic oligonucleotide
gaatcatctctcaaatctatt

SEQ ID NO: 21505 - RNA, 21 nt, synthetic construct
  source 1..21: mol_type = other RNA; note = Description of Artificial Sequence: Synthetic oligonucleotide
aatcatctctcaaatctaatt

SEQ ID NO: 21506 - RNA, 21 nt, synthetic construct
  source 1..21: mol_type = other RNA; note = Description of Artificial Sequence: Synthetic oligonucleotide
atcatctctcaaatctagatt

SEQ ID NO: 21507 - RNA, 21 nt, synthetic construct
  source 1..21: mol_type = other RNA; note = Description of Artificial Sequence: Synthetic oligonucleotide
tcatctctcaaatctagtatt

SEQ ID NO: 21508 - RNA, 21 nt, synthetic construct
  source 1..21: mol_type = other RNA; note = Description of Artificial Sequence: Synthetic oligonucleotide
catctctcaaatctagttatt

SEQ ID NO: 21509 - RNA, 21 nt, synthetic construct
  source 1..21: mol_type = other RNA; note = Description of Artificial Sequence: Synthetic oligonucleotide
atctctcaaatctagttaatt

SEQ ID NO: 21510 - RNA, 21 nt, synthetic construct
  source 1..21: mol_type = other RNA; note = Description of Artificial Sequence: Synthetic oligonucleotide
tctctcaaatctagttagatt

SEQ ID NO: 21511 - RNA, 21 nt, synthetic construct
  source 1..21: mol_type = other RNA; note = Description of Artificial Sequence: Synthetic oligonucleotide
ctctcaaatctagttagaatt

SEQ ID NO: 21512 - RNA, 21 nt, synthetic construct
  source 1..21: mol_type = other RNA; note = Description of Artificial Sequence: Synthetic oligonucleotide
tctcaaatctagttagacatt

SEQ ID NO: 21513 - RNA, 21 nt, synthetic construct
  source 1..21: mol_type = other RNA; note = Description of Artificial Sequence: Synthetic oligonucleotide
ctcaaatctagttagacaatt

SEQ ID NO: 21514 - RNA, 21 nt, synthetic construct
  source 1..21: mol_type = other RNA; note = Description of Artificial Sequence: Synthetic oligonucleotide
tcaaatctagttagacaaatt

SEQ ID NO: 21515 - RNA, 21 nt, synthetic construct
  source 1..21: mol_type = other RNA; note = Description of Artificial Sequence: Synthetic oligonucleotide
caaatctagttagacaatatt

SEQ ID NO: 21516 - RNA, 21 nt, synthetic construct
  source 1..21: mol_type = other RNA; note = Description of Artificial Sequence: Synthetic oligonucleotide
aaatctagttagacaattatt

SEQ ID NO: 21517 - RNA, 21 nt, synthetic construct
  source 1..21: mol_type = other RNA; note = Description of Artificial Sequence: Synthetic oligonucleotide
aatctagttagacaatttatt

SEQ ID NO: 21518 - RNA, 21 nt, synthetic construct
  source 1..21: mol_type = other RNA; note = Description of Artificial Sequence: Synthetic oligonucleotide
atctagttagacaatttgatt

SEQ ID NO: 21519 - RNA, 21 nt, synthetic construct
  source 1..21: mol_type = other RNA; note = Description of Artificial Sequence: Synthetic oligonucleotide
tctagttagacaatttgcatt

SEQ ID NO: 21520 - RNA, 21 nt, synthetic construct
  source 1..21: mol_type = other RNA; note = Description of Artificial Sequence: Synthetic oligonucleotide
ctagttagacaatttgcaatt

SEQ ID NO: 21521 - RNA, 21 nt, synthetic construct
  source 1..21: mol_type = other RNA; note = Description of Artificial Sequence: Synthetic oligonucleotide
tagttagacaatttgcacatt

SEQ ID NO: 21522 - RNA, 21 nt, synthetic construct
  source 1..21: mol_type = other RNA; note = Description of Artificial Sequence: Synthetic oligonucleotide
agttagacaatttgcacaatt

SEQ ID NO: 21523 - RNA, 21 nt, synthetic construct
  source 1..21: mol_type = other RNA; note = Description of Artificial Sequence: Synthetic oligonucleotide
gttagacaatttgcacacatt

SEQ ID NO: 21524 - RNA, 21 nt, synthetic construct
  source 1..21: mol_type = other RNA; note = Description of Artificial Sequence: Synthetic oligonucleotide
ttagacaatttgcacacaatt

SEQ ID NO: 21525 - RNA, 21 nt, synthetic construct
  source 1..21: mol_type = other RNA; note = Description of Artificial Sequence: Synthetic oligonucleotide
tagacaatttgcacacatatt

SEQ ID NO: 21526 - RNA, 21 nt, synthetic construct
  source 1..21: mol_type = other RNA; note = Description of Artificial Sequence: Synthetic oligonucleotide
agacaatttgcacacataatt

SEQ ID NO: 21527 - RNA, 21 nt, synthetic construct
  source 1..21: mol_type = other RNA; note = Description of Artificial Sequence: Synthetic oligonucleotide
gacaatttgcacacatacatt

SEQ ID NO: 21528 - RNA, 21 nt, synthetic construct
  source 1..21: mol_type = other RNA; note = Description of Artificial Sequence: Synthetic oligonucleotide
acaatttgcacacatactatt

SEQ ID NO: 21529 - RNA, 21 nt, synthetic construct
  source 1..21: mol_type = other RNA; note = Description of Artificial Sequence: Synthetic oligonucleotide
caatttgcacacatacttatt

SEQ ID NO: 21530 - RNA, 21 nt, synthetic construct
  source 1..21: mol_type = other RNA; note = Description of Artificial Sequence: Synthetic oligonucleotide
aatttgcacacatactttatt

SEQ ID NO: 21531 - RNA, 21 nt, synthetic construct
  source 1..21: mol_type = other RNA; note = Description of Artificial Sequence: Synthetic oligonucleotide
atttgcacacatacttttatt

SEQ ID NO: 21532 - RNA, 21 nt, synthetic construct
  source 1..21: mol_type = other RNA; note = Description of Artificial Sequence: Synthetic oligonucleotide
tttgcacacatacttttcatt

SEQ ID NO: 21533 - RNA, 21 nt, synthetic construct
  source 1..21: mol_type = other RNA; note = Description of Artificial Sequence: Synthetic oligonucleotide
ttgcacacatacttttctatt

SEQ ID NO: 21534 - RNA, 21 nt, synthetic construct
  source 1..21: mol_type = other RNA; note = Description of Artificial Sequence: Synthetic oligonucleotide
tgcacacatacttttctaatt

SEQ ID NO: 21535 - RNA, 21 nt, synthetic construct
  source 1..21: mol_type = other RNA; note = Description of Artificial Sequence: Synthetic oligonucleotide
gcacacatacttttctaaatt

SEQ ID NO: 21536 - RNA, 21 nt, synthetic construct
  source 1..21: mol_type = other RNA; note = Description of Artificial Sequence: Synthetic oligonucleotide
cacacatacttttctaagatt

SEQ ID NO: 21537 - RNA, 21 nt, synthetic construct
  source 1..21: mol_type = other RNA; note = Description of Artificial Sequence: Synthetic oligonucleotide
acacatacttttctaaggatt

SEQ ID NO: 21538 - RNA, 21 nt, synthetic construct
  source 1..21: mol_type = other RNA; note = Description of Artificial Sequence: Synthetic oligonucleotide
cacatacttttctaagggatt

SEQ ID NO: 21539 - RNA, 21 nt, synthetic construct
  source 1..21: mol_type = other RNA; note = Description of Artificial Sequence: Synthetic oligonucleotide
acatacttttctaagggaatt

SEQ ID NO: 21540 - RNA, 21 nt, synthetic construct
  source 1..21: mol_type = other RNA; note = Description of Artificial Sequence: Synthetic oligonucleotide
catacttttctaagggacatt

SEQ ID NO: 21541 - RNA, 21 nt, synthetic construct
  source 1..21: mol_type = other RNA; note = Description of Artificial Sequence: Synthetic oligonucleotide
atacttttctaagggacaatt

SEQ ID NO: 21542 - RNA, 21 nt, synthetic construct
  source 1..21: mol_type = other RNA; note = Description of Artificial Sequence: Synthetic oligonucleotide
tacttttctaagggacatatt

SEQ ID NO: 21543 - RNA, 21 nt, synthetic construct
  source 1..21: mol_type = other RNA; note = Description of Artificial Sequence: Synthetic oligonucleotide
acttttctaagggacattatt

SEQ ID NO: 21544 - RNA, 21 nt, synthetic construct
  source 1..21: mol_type = other RNA; note = Description of Artificial Sequence: Synthetic oligonucleotide
cttttctaagggacattaatt

SEQ ID NO: 21545 - RNA, 21 nt, synthetic construct
  source 1..21: mol_type = other RNA; note = Description of Artificial Sequence: Synthetic oligonucleotide
ttttctaagggacattatatt

SEQ ID NO: 21546 - RNA, 21 nt, synthetic construct
  source 1..21: mol_type = other RNA; note = Description of Artificial Sequence: Synthetic oligonucleotide
tttctaagggacattatcatt

SEQ ID NO: 21547 - RNA, 21 nt, synthetic construct
  source 1..21: mol_type = other RNA; note = Description of Artificial Sequence: Synthetic oligonucleotide
ttctaagggacattatctatt

SEQ ID NO: 21548 - RNA, 21 nt, synthetic construct
  source 1..21: mol_type = other RNA; note = Description of Artificial Sequence: Synthetic oligonucleotide
tctaagggacattatcttatt

SEQ ID NO: 21549 - RNA, 21 nt, synthetic construct
  source 1..21: mol_type = other RNA; note = Description of Artificial Sequence: Synthetic oligonucleotide
ctaagggacattatcttcatt

SEQ ID NO: 21550 - RNA, 21 nt, synthetic construct
  source 1..21: mol_type = other RNA; note = Description of Artificial Sequence: Synthetic oligonucleotide
taagggacattatcttccatt

SEQ ID NO: 21551 - RNA, 21 nt, synthetic construct
  source 1..21: mol_type = other RNA; note = Description of Artificial Sequence: Synthetic oligonucleotide
aagggacattatcttcctatt

SEQ ID NO: 21552 - RNA, 21 nt, synthetic construct
  source 1..21: mol_type = other RNA; note = Description of Artificial Sequence: Synthetic oligonucleotide
agggacattatcttccttatt

SEQ ID NO: 21553 - RNA, 21 nt, synthetic construct
  source 1..21: mol_type = other RNA; note = Description of Artificial Sequence: Synthetic oligonucleotide
gggacattatcttccttcatt

SEQ ID NO: 21554 - RNA, 21 nt, synthetic construct
  source 1..21: mol_type = other RNA; note = Description of Artificial Sequence: Synthetic oligonucleotide
ggacattatcttccttcaatt

SEQ ID NO: 21555 - RNA, 21 nt, synthetic construct
  source 1..21: mol_type = other RNA; note = Description of Artificial Sequence: Synthetic oligonucleotide
gacattatcttccttcagatt

SEQ ID NO: 21556 - RNA, 21 nt, synthetic construct
  source 1..21: mol_type = other RNA; note = Description of Artificial Sequence: Synthetic oligonucleotide
acattatcttccttcaggatt

SEQ ID NO: 21557 - RNA, 21 nt, synthetic construct
  source 1..21: mol_type = other RNA; note = Description of Artificial Sequence: Synthetic oligonucleotide
cattatcttccttcaggtatt

SEQ ID NO: 21558 - RNA, 21 nt, synthetic construct
  source 1..21: mol_type = other RNA; note = Description of Artificial Sequence: Synthetic oligonucleotide
attatcttccttcaggttatt

SEQ ID NO: 21559 - RNA, 21 nt, synthetic construct
  source 1..21: mol_type = other RNA; note = Description of Artificial Sequence: Synthetic oligonucleotide
ttatcttccttcaggtttatt

SEQ ID NO: 21560 - RNA, 21 nt, synthetic construct
  source 1..21: mol_type = other RNA; note = Description of Artificial Sequence: Synthetic oligonucleotide
tatcttccttcaggttttatt

SEQ ID NO: 21561 - RNA, 21 nt, synthetic construct
  source 1..21: mol_type = other RNA; note = Description of Artificial Sequence: Synthetic oligonucleotide
atcttccttcaggtttttatt

SEQ ID NO: 21562 - RNA, 21 nt, synthetic construct
  source 1..21: mol_type = other RNA; note = Description of Artificial Sequence: Synthetic oligonucleotide
tcttccttcaggtttttaatt

SEQ ID NO: 21563 - RNA, 21 nt, synthetic construct
  source 1..21: mol_type = other RNA; note = Description of Artificial Sequence: Synthetic oligonucleotide
cttccttcaggtttttacatt

SEQ ID NO: 21564 - RNA, 21 nt, synthetic construct
  source 1..21: mol_type = other RNA; note = Description of Artificial Sequence: Synthetic oligonucleotide
ttccttcaggtttttaccatt

SEQ ID NO: 21565 - RNA, 21 nt, synthetic construct
  source 1..21: mol_type = other RNA; note = Description of Artificial Sequence: Synthetic oligonucleotide
tccttcaggtttttacctatt

SEQ ID NO: 21566 - RNA, 21 nt, synthetic construct
  source 1..21: mol_type = other RNA; note = Description of Artificial Sequence: Synthetic oligonucleotide
ccttcaggtttttacctcatt

SEQ ID NO: 21567 - RNA, 21 nt, synthetic construct
  source 1..21: mol_type = other RNA; note = Description of Artificial Sequence: Synthetic oligonucleotide
cttcaggtttttacctccatt

SEQ ID NO: 21568 - RNA, 21 nt, synthetic construct
  source 1..21: mol_type = other RNA; note = Description of Artificial Sequence: Synthetic oligonucleotide
ttcaggtttttacctccaatt

SEQ ID NO: 21569 - RNA, 21 nt, synthetic construct
  source 1..21: mol_type = other RNA; note = Description of Artificial Sequence: Synthetic oligonucleotide
tcaggtttttacctccacatt

SEQ ID NO: 21570 - RNA, 21 nt, synthetic construct
  source 1..21: mol_type = other RNA; note = Description of Artificial Sequence: Synthetic oligonucleotide
caggtttttacctccactatt

SEQ ID NO: 21571 - RNA, 21 nt, synthetic construct
  source 1..21: mol_type = other RNA; note = Description of Artificial Sequence: Synthetic oligonucleotide
aggtttttacctccactcatt

SEQ ID NO: 21572 - RNA, 21 nt, synthetic construct
  source 1..21: mol_type = other RNA; note = Description of Artificial Sequence: Synthetic oligonucleotide
ggtttttacctccactcaatt

SEQ ID NO: 21573 - RNA, 21 nt, synthetic construct
  source 1..21: mol_type = other RNA; note = Description of Artificial Sequence: Synthetic oligonucleotide
gtttttacctccactcatatt

SEQ ID NO: 21574 - RNA, 21 nt, synthetic construct
  source 1..21: mol_type = other RNA; note = Description of Artificial Sequence: Synthetic oligonucleotide
tttttacctccactcatcatt

SEQ ID NO: 21575 - RNA, 21 nt, synthetic construct
  source 1..21: mol_type = other RNA; note = Description of Artificial Sequence: Synthetic oligonucleotide
ttttacctccactcatccatt

SEQ ID NO: 21576 - RNA, 21 nt, synthetic construct
  source 1..21: mol_type = other RNA; note = Description of Artificial Sequence: Synthetic oligonucleotide
tttacctccactcatcctatt

SEQ ID NO: 21577 - RNA, 21 nt, synthetic construct
  source 1..21: mol_type = other RNA; note = Description of Artificial Sequence: Synthetic oligonucleotide
ttacctccactcatccttatt

SEQ ID NO: 21578 - RNA, 21 nt, synthetic construct
  source 1..21: mol_type = other RNA; note = Description of Artificial Sequence: Synthetic oligonucleotide
tacctccactcatccttaatt

SEQ ID NO: 21579 - RNA, 21 nt, synthetic construct
  source 1..21: mol_type = other RNA; note = Description of Artificial Sequence: Synthetic oligonucleotide
acctccactcatccttagatt

SEQ ID NO: 21580 - RNA, 21 nt, synthetic construct
  source 1..21: mol_type = other RNA; note = Description of Artificial Sequence: Synthetic oligonucleotide
cctccactcatccttagaatt

SEQ ID NO: 21581 - RNA, 21 nt, synthetic construct
  source 1..21: mol_type = other RNA; note = Description of Artificial Sequence: Synthetic oligonucleotide
ctccactcatccttagagatt

SEQ ID NO: 21582 - RNA, 21 nt, synthetic construct
  source 1..21: mol_type = other RNA; note = Description of Artificial Sequence: Synthetic oligonucleotide
tccactcatccttagagcatt

SEQ ID NO: 21583 - RNA, 21 nt, synthetic construct
  source 1..21: mol_type = other RNA; note = Description of Artificial Sequence: Synthetic oligonucleotide
ccactcatccttagagccatt

SEQ ID NO: 21584 - RNA, 21 nt, synthetic construct
  source 1..21: mol_type = other RNA; note = Description of Artificial Sequence: Synthetic oligonucleotide
cactcatccttagagcccatt

SEQ ID NO: 21585 - RNA, 21 nt, synthetic construct
  source 1..21: mol_type = other RNA; note = Description of Artificial Sequence: Synthetic oligonucleotide
actcatccttagagcccaatt

SEQ ID NO: 21586 - RNA, 21 nt, synthetic construct
  source 1..21: mol_type = other RNA; note = Description of Artificial Sequence: Synthetic oligonucleotide
ctcatccttagagcccacatt

SEQ ID NO: 21587 - RNA, 21 nt, synthetic construct
  source 1..21: mol_type = other RNA; note = Description of Artificial Sequence: Synthetic oligonucleotide
tcatccttagagcccactatt

SEQ ID NO: 21588 - RNA, 21 nt, synthetic construct
  source 1..21: mol_type = other RNA; note = Description of Artificial Sequence: Synthetic oligonucleotide
catccttagagcccactgatt

SEQ ID NO: 21589 - RNA, 21 nt, synthetic construct
  source 1..21: mol_type = other RNA; note = Description of Artificial Sequence: Synthetic oligonucleotide
atccttagagcccactgaatt

SEQ ID NO: 21590 - RNA, 21 nt, synthetic construct
  source 1..21: mol_type = other RNA; note = Description of Artificial Sequence: Synthetic oligonucleotide
tccttagagcccactgacatt

SEQ ID NO: 21591 - RNA, 21 nt, synthetic construct
  source 1..21: mol_type = other RNA; note = Description of Artificial Sequence: Synthetic oligonucleotide
ccttagagcccactgactatt

SEQ ID NO: 21592 - RNA, 21 nt, synthetic construct
  source 1..21: mol_type = other RNA; note = Description of Artificial Sequence: Synthetic oligonucleotide
cttagagcccactgactgatt

SEQ ID NO: 21593 - RNA, 21 nt, synthetic construct
  source 1..21: mol_type = other RNA; note = Description of Artificial Sequence: Synthetic oligonucleotide
ttagagcccactgactgcatt

SEQ ID NO: 21594 - RNA, 21 nt, synthetic construct
  source 1..21: mol_type = other RNA; note = Description of Artificial Sequence: Synthetic oligonucleotide
tagagcccactgactgctatt

SEQ ID NO: 21595 - RNA, 21 nt, synthetic construct
  source 1..21: mol_type = other RNA; note = Description of Artificial Sequence: Synthetic oligonucleotide
agagcccactgactgctcatt

SEQ ID NO: 21596 - RNA, 21 nt, synthetic construct
  source 1..21: mol_type = other RNA; note = Description of Artificial Sequence: Synthetic oligonucleotide
gagcccactgactgctccatt

SEQ ID NO: 21597 - RNA, 21 nt, synthetic construct
  source 1..21: mol_type = other RNA; note = Description of Artificial Sequence: Synthetic oligonucleotide
agcccactgactgctcccatt

SEQ ID NO: 21598 - RNA, 21 nt, synthetic construct
  source 1..21: mol_type = other RNA; note = Description of Artificial Sequence: Synthetic oligonucleotide
gcccactgactgctccccatt

SEQ ID NO: 21599 - RNA, 21 nt, synthetic construct
  source 1..21: mol_type = other RNA; note = Description of Artificial Sequence: Synthetic oligonucleotide
cccactgactgctcccctatt

SEQ ID NO: 21600 - RNA, 21 nt, synthetic construct
  source 1..21: mol_type = other RNA; note = Description of Artificial Sequence: Synthetic oligonucleotide
ccactgactgctccccttatt

SEQ ID NO: 21601 - RNA, 21 nt, synthetic construct
  source 1..21: mol_type = other RNA; note = Description of Artificial Sequence: Synthetic oligonucleotide
cactgactgctcccctttatt

SEQ ID NO: 21602 - RNA, 21 nt, synthetic construct
  source 1..21: mol_type = other RNA; note = Description of Artificial Sequence: Synthetic oligonucleotide
actgactgctcccctttaatt

SEQ ID NO: 21603 - RNA, 21 nt, synthetic construct
  source 1..21: mol_type = other RNA; note = Description of Artificial Sequence: Synthetic oligonucleotide
ctgactgctcccctttatatt

SEQ ID NO: 21604 - RNA, 21 nt, synthetic construct
  source 1..21: mol_type = other RNA; note = Description of Artificial Sequence: Synthetic oligonucleotide
tgactgctcccctttataatt

SEQ ID NO: 21605 - RNA, 21 nt, synthetic construct
  source 1..21: mol_type = other RNA; note = Description of Artificial Sequence: Synthetic oligonucleotide
gactgctcccctttatacatt

SEQ ID NO: 21606 - RNA, 21 nt, synthetic construct
  source 1..21: mol_type = other RNA; note = Description of Artificial Sequence: Synthetic oligonucleotide
actgctcccctttataccatt

SEQ ID NO: 21607 - RNA, 21 nt, synthetic construct
  source 1..21: mol_type = other RNA; note = Description of Artificial Sequence: Synthetic oligonucleotide
ctgctcccctttatacctatt

SEQ ID NO: 21608 - RNA, 21 nt, synthetic construct
  source 1..21: mol_type = other RNA; note = Description of Artificial Sequence: Synthetic oligonucleotide
tgctcccctttatacctgatt

SEQ ID NO: 21609 - RNA, 21 nt, synthetic construct
  source 1..21: mol_type = other RNA; note = Description of Artificial Sequence: Synthetic oligonucleotide
gctcccctttatacctgtatt

SEQ ID NO: 21610 - RNA, 21 nt, synthetic construct
  source 1..21: mol_type = other RNA; note = Description of Artificial Sequence: Synthetic oligonucleotide
ctcccctttatacctgttatt

SEQ ID NO: 21611 - RNA, 21 nt, synthetic construct
  source 1..21: mol_type = other RNA; note = Description of Artificial Sequence: Synthetic oligonucleotide
tcccctttatacctgttgatt

SEQ ID NO: 21612 - RNA, 21 nt, synthetic construct
  source 1..21: mol_type = other RNA; note = Description of Artificial Sequence: Synthetic oligonucleotide
cccctttatacctgttggatt

SEQ ID NO: 21613 - RNA, 21 nt, synthetic construct
  source 1..21: mol_type = other RNA; note = Description of Artificial Sequence: Synthetic oligonucleotide
ccctttatacctgttggcatt

SEQ ID NO: 21614 - RNA, 21 nt, synthetic construct
  source 1..21: mol_type = other RNA; note = Description of Artificial Sequence: Synthetic oligonucleotide
cctttatacctgttggccatt

SEQ ID NO: 21615 - RNA, 21 nt, synthetic construct
  source 1..21: mol_type = other RNA; note = Description of Artificial Sequence: Synthetic oligonucleotide
ctttatacctgttggcccatt

SEQ ID NO: 21616 - RNA, 21 nt, synthetic construct
  source 1..21: mol_type = other RNA; note = Description of Artificial Sequence: Synthetic oligonucleotide
tttatacctgttggccctatt

SEQ ID NO: 21617 - RNA, 21 nt, synthetic construct
  source 1..21: mol_type = other RNA; note = Description of Artificial Sequence: Synthetic oligonucleotide
ttatacctgttggccctgatt

SEQ ID NO: 21618 - RNA, 21 nt, synthetic construct
  source 1..21: mol_type = other RNA; note = Description of Artificial Sequence: Synthetic oligonucleotide
tatacctgttggccctgcatt

SEQ ID NO: 21619 - RNA, 21 nt, synthetic construct
  source 1..21: mol_type = other RNA; note = Description of Artificial Sequence: Synthetic oligonucleotide
atacctgttggccctgccatt

SEQ ID NO: 21620 - RNA, 21 nt, synthetic construct
  source 1..21: mol_type = other RNA; note = Description of Artificial Sequence: Synthetic oligonucleotide
tacctgttggccctgcctatt

SEQ ID NO: 21621 - RNA, 21 nt, synthetic construct
  source 1..21: mol_type = other RNA; note = Description of Artificial Sequence: Synthetic oligonucleotide
acctgttggccctgcctaatt

SEQ ID NO: 21622 - RNA, 21 nt, synthetic construct
  source 1..21: mol_type = other RNA; note = Description of Artificial Sequence: Synthetic oligonucleotide
cctgttggccctgcctatatt

SEQ ID NO: 21623 - RNA, 21 nt, synthetic construct
  source 1..21: mol_type = other RNA; note = Description of Artificial Sequence: Synthetic oligonucleotide
ctgttggccctgcctataatt

SEQ ID NO: 21624 - RNA, 21 nt, synthetic construct
  source 1..21: mol_type = other RNA; note = Description of Artificial Sequence: Synthetic oligonucleotide
tgttggccctgcctatagatt

SEQ ID NO: 21625 - RNA, 21 nt, synthetic construct
  source 1..21: mol_type = other RNA; note = Description of Artificial Sequence: Synthetic oligonucleotide
gttggccctgcctataggatt

SEQ ID NO: 21626 - RNA, 21 nt, synthetic construct
  source 1..21: mol_type = other RNA; note = Description of Artificial Sequence: Synthetic oligonucleotide
ttggccctgcctataggaatt

SEQ ID NO: 21627 - RNA, 21 nt, synthetic construct
  source 1..21: mol_type = other RNA; note = Description of Artificial Sequence: Synthetic oligonucleotide
tggccctgcctataggagatt

SEQ ID NO: 21628 - RNA, 21 nt, synthetic construct
  source 1..21: mol_type = other RNA; note = Description of Artificial Sequence: Synthetic oligonucleotide
ggccctgcctataggagaatt

SEQ ID NO: 21629 - RNA, 21 nt, synthetic construct
  source 1..21: mol_type = other RNA; note = Description of Artificial Sequence: Synthetic oligonucleotide
gccctgcctataggagagatt

SEQ ID NO: 21630 - RNA, 21 nt, synthetic construct
  source 1..21: mol_type = other RNA; note = Description of Artificial Sequence: Synthetic oligonucleotide
ccctgcctataggagagaatt

SEQ ID NO: 21631 - RNA, 21 nt, synthetic construct
  source 1..21: mol_type = other RNA; note = Description of Artificial Sequence: Synthetic oligonucleotide
cctgcctataggagagaaatt

SEQ ID NO: 21632 - RNA, 21 nt, synthetic construct
  source 1..21: mol_type = other RNA; note = Description of Artificial Sequence: Synthetic oligonucleotide
ctgcctataggagagaatatt

SEQ ID NO: 21633 - RNA, 21 nt, synthetic construct
  source 1..21: mol_type = other RNA; note = Description of Artificial Sequence: Synthetic oligonucleotide
tgcctataggagagaataatt

SEQ ID NO: 21634 - RNA, 21 nt, synthetic construct
  source 1..21: mol_type = other RNA; note = Description of Artificial Sequence: Synthetic oligonucleotide
gcctataggagagaatatatt

SEQ ID NO: 21635 - RNA, 21 nt, synthetic construct
  source 1..21: mol_type = other RNA; note = Description of Artificial Sequence: Synthetic oligonucleotide
cctataggagagaatattatt

SEQ ID NO: 21636 - RNA, 21 nt, synthetic construct
  source 1..21: mol_type = other RNA; note = Description of Artificial Sequence: Synthetic oligonucleotide
ctataggagagaatatttatt

SEQ ID NO: 21637 - RNA, 21 nt, synthetic construct
  source 1..21: mol_type = other RNA; note = Description of Artificial Sequence: Synthetic oligonucleotide
tataggagagaatatttgatt

SEQ ID NO: 21638 - RNA, 21 nt, synthetic construct
  source 1..21: mol_type = other RNA; note = Description of Artificial Sequence: Synthetic oligonucleotide
ataggagagaatatttggatt

SEQ ID NO: 21639 - RNA, 21 nt, synthetic construct
  source 1..21: mol_type = other RNA; note = Description of Artificial Sequence: Synthetic oligonucleotide
taggagagaatatttggaatt

SEQ ID NO: 21640 - RNA, 21 nt, synthetic construct
  source 1..21: mol_type = other RNA; note = Description of Artificial Sequence: Synthetic oligonucleotide
aggagagaatatttggagatt

SEQ ID NO: 21641 - RNA, 21 nt, synthetic construct
  source 1..21: mol_type = other RNA; note = Description of Artificial Sequence: Synthetic oligonucleotide
ggagagaatatttggagaatt

SEQ ID NO: 21642 - RNA, 21 nt, synthetic construct
  source 1..21: mol_type = other RNA; note = Description of Artificial Sequence: Synthetic oligonucleotide
gagagaatatttggagatatt

SEQ ID NO: 21643 - RNA, 21 nt, synthetic construct
  source 1..21: mol_type = other RNA; note = Description of Artificial Sequence: Synthetic oligonucleotide
agagaatatttggagataatt

SEQ ID NO: 21644 - RNA, 21 nt, synthetic construct
  source 1..21: mol_type = other RNA; note = Description of Artificial Sequence: Synthetic oligonucleotide
gagaatatttggagatagatt

SEQ ID NO: 21645 - RNA, 21 nt, synthetic construct
  source 1..21: mol_type = other RNA; note = Description of Artificial Sequence: Synthetic oligonucleotide
agaatatttggagataggatt

SEQ ID NO: 21646 - RNA, 21 nt, synthetic construct
  source 1..21: mol_type = other RNA; note = Description of Artificial Sequence: Synthetic oligonucleotide
gaatatttggagataggcatt

SEQ ID NO: 21647 - RNA, 21 nt, synthetic construct
  source 1..21: mol_type = other RNA; note = Description of Artificial Sequence: Synthetic oligonucleotide
aatatttggagataggcaatt

SEQ ID NO: 21648 - RNA, 21 nt, synthetic construct
  source 1..21: mol_type = other RNA; note = Description of Artificial Sequence: Synthetic oligonucleotide
atatttggagataggcagatt

SEQ ID NO: 21649 - RNA, 21 nt, synthetic construct
  source 1..21: mol_type = other RNA; note = Description of Artificial Sequence: Synthetic oligonucleotide
tatttggagataggcagcatt

SEQ ID NO: 21650 - RNA, 21 nt, synthetic construct
  source 1..21: mol_type = other RNA; note = Description of Artificial Sequence: Synthetic oligonucleotide
atttggagataggcagctatt

SEQ ID NO: 21651 - RNA, 21 nt, synthetic construct
  source 1..21: mol_type = other RNA; note = Description of Artificial Sequence: Synthetic oligonucleotide
tttggagataggcagcttatt

SEQ ID NO: 21652 - RNA, 21 nt, synthetic construct
  source 1..21: mol_type = other RNA; note = Description of Artificial Sequence: Synthetic oligonucleotide
ttggagataggcagcttcatt

SEQ ID NO: 21653 - RNA, 21 nt, synthetic construct
  source 1..21: mol_type = other RNA; note = Description of Artificial Sequence: Synthetic oligonucleotide
tggagataggcagcttcaatt

SEQ ID NO: 21654 - RNA, 21 nt, synthetic construct
  source 1..21: mol_type = other RNA; note = Description of Artificial Sequence: Synthetic oligonucleotide
ggagataggcagcttcagatt

SEQ ID NO: 21655 - RNA, 21 nt, synthetic construct
  source 1..21: mol_type = other RNA; note = Description of Artificial Sequence: Synthetic oligonucleotide
gagataggcagcttcaggatt

SEQ ID NO: 21656 - RNA, 21 nt, synthetic construct
  source 1..21: mol_type = other RNA; note = Description of Artificial Sequence: Synthetic oligonucleotide
agataggcagcttcaggaatt

SEQ ID NO: 21657 - RNA, 21 nt, synthetic construct
  source 1..21: mol_type = other RNA; note = Description of Artificial Sequence: Synthetic oligonucleotide
gataggcagcttcaggatatt

SEQ ID NO: 21658 - RNA, 21 nt, synthetic construct
  source 1..21: mol_type = other RNA; note = Description of Artificial Sequence: Synthetic oligonucleotide
ataggcagcttcaggatgatt

SEQ ID NO: 21659 - RNA, 21 nt, synthetic construct
  source 1..21: mol_type = other RNA; note = Description of Artificial Sequence: Synthetic oligonucleotide
taggcagcttcaggatgcatt

SEQ ID NO: 21660 - RNA, 21 nt, synthetic construct
  source 1..21: mol_type = other RNA; note = Description of Artificial Sequence: Synthetic oligonucleotide
aggcagcttcaggatgcaatt

SEQ ID NO: 21661 - RNA, 21 nt, synthetic construct
  source 1..21: mol_type = other RNA; note = Description of Artificial Sequence: Synthetic oligonucleotide
ggcagcttcaggatgcatatt

SEQ ID NO: 21662 - RNA, 21 nt, synthetic construct
  source 1..21: mol_type = other RNA; note = Description of Artificial Sequence: Synthetic oligonucleotide
gcagcttcaggatgcattatt

SEQ ID NO: 21663 - RNA, 21 nt, synthetic construct
  source 1..21: mol_type = other RNA; note = Description of Artificial Sequence: Synthetic oligonucleotide
cagcttcaggatgcattgatt

SEQ ID NO: 21664 - RNA, 21 nt, synthetic construct
  source 1..21: mol_type = other RNA; note = Description of Artificial Sequence: Synthetic oligonucleotide
agcttcaggatgcattgcatt

SEQ ID NO: 21665 - RNA, 21 nt, synthetic construct
  source 1..21: mol_type = other RNA; note = Description of Artificial Sequence: Synthetic oligonucleotide
gcttcaggatgcattgcaatt

SEQ ID NO: 21666 - RNA, 21 nt, synthetic construct
  source 1..21: mol_type = other RNA; note = Description of Artificial Sequence: Synthetic oligonucleotide
cttcaggatgcattgcaaatt

SEQ ID NO: 21667 - RNA, 21 nt, synthetic construct
  source 1..21: mol_type = other RNA; note = Description of Artificial Sequence: Synthetic oligonucleotide
ttcaggatgcattgcaatatt

SEQ ID NO: 21668 - RNA, 21 nt, synthetic construct
  source 1..21: mol_type = other RNA; note = Description of Artificial Sequence: Synthetic oligonucleotide
tcaggatgcattgcaatcatt

SEQ ID NO: 21669 - RNA, 21 nt, synthetic construct
  source 1..21: mol_type = other RNA; note = Description of Artificial Sequence: Synthetic oligonucleotide
caggatgcattgcaatcaatt

SEQ ID NO: 21670 - RNA, 21 nt, synthetic construct
  source 1..21: mol_type = other RNA; note = Description of Artificial Sequence: Synthetic oligonucleotide
aggatgcattgcaatcatatt

SEQ ID NO: 21671 - RNA, 21 nt, synthetic construct
  source 1..21: mol_type = other RNA; note = Description of Artificial Sequence: Synthetic oligonucleotide
ggatgcattgcaatcatcatt

SEQ ID NO: 21672 - RNA, 21 nt, synthetic construct
  source 1..21: mol_type = other RNA; note = Description of Artificial Sequence: Synthetic oligonucleotide
gatgcattgcaatcatccatt

SEQ ID NO: 21673 - RNA, 21 nt, synthetic construct
  source 1..21: mol_type = other RNA; note = Description of Artificial Sequence: Synthetic oligonucleotide
atgcattgcaatcatcctatt

SEQ ID NO: 21674 - RNA, 21 nt, synthetic construct
  source 1..21: mol_type = other RNA; note = Description of Artificial Sequence: Synthetic oligonucleotide
tgcattgcaatcatccttatt

SEQ ID NO: 21675 - RNA, 21 nt, synthetic construct
  source 1..21: mol_type = other RNA; note = Description of Artificial Sequence: Synthetic oligonucleotide
gcattgcaatcatcctttatt

SEQ ID NO: 21676 - RNA, 21 nt, synthetic construct
  source 1..21: mol_type = other RNA; note = Description of Artificial Sequence: Synthetic oligonucleotide
cattgcaatcatccttttatt

SEQ ID NO: 21677 - RNA, 21 nt, synthetic construct
  source 1..21: mol_type = other RNA; note = Description of Artificial Sequence: Synthetic oligonucleotide
attgcaatcatccttttcatt

SEQ ID NO: 21678 - RNA, 21 nt, synthetic construct
  source 1..21: mol_type = other RNA; note = Description of Artificial Sequence: Synthetic oligonucleotide
ttgcaatcatccttttctatt

SEQ ID NO: 21679 - RNA, 21 nt, synthetic construct
  source 1..21: mol_type = other RNA; note = Description of Artificial Sequence: Synthetic oligonucleotide
tgcaatcatccttttcttatt

SEQ ID NO: 21680 - RNA, 21 nt, synthetic construct
  source 1..21: mol_type = other RNA; note = Description of Artificial Sequence: Synthetic oligonucleotide
gcaatcatccttttcttaatt

SEQ ID NO: 21681 - RNA, 21 nt, synthetic construct
  source 1..21: mol_type = other RNA; note = Description of Artificial Sequence: Synthetic oligonucleotide
caatcatccttttcttaaatt

SEQ ID NO: 21682 - RNA, 21 nt, synthetic construct
  source 1..21: mol_type = other RNA; note = Description of Artificial Sequence: Synthetic oligonucleotide
aatcatccttttcttaaaatt

SEQ ID NO: 21683 - RNA, 21 nt, synthetic construct
  source 1..21: mol_type = other RNA; note = Description of Artificial Sequence: Synthetic oligonucleotide
atcatccttttcttaaatatt

SEQ ID NO: 21684 - RNA, 21 nt, synthetic construct
  source 1..21: mol_type = other RNA; note = Description of Artificial Sequence: Synthetic oligonucleotide
tcatccttttcttaaattatt

SEQ ID NO: 21685 - RNA, 21 nt, synthetic construct
  source 1..21: mol_type = other RNA; note = Description of Artificial Sequence: Synthetic oligonucleotide
catccttttcttaaattaatt

SEQ ID NO: 21686 - RNA, 21 nt, synthetic construct
  source 1..21: mol_type = other RNA; note = Description of Artificial Sequence: Synthetic oligonucleotide
atccttttcttaaattatatt

SEQ ID NO: 21687 - RNA, 21 nt, synthetic construct
  source 1..21: mol_type = other RNA; note = Description of Artificial Sequence: Synthetic oligonucleotide
tccttttcttaaattatgatt

SEQ ID NO: 21688 - RNA, 21 nt, synthetic construct
  source 1..21: mol_type = other RNA; note = Description of Artificial Sequence: Synthetic oligonucleotide
ccttttcttaaattatgtatt

SEQ ID NO: 21689 - RNA, 21 nt, synthetic construct
  source 1..21: mol_type = other RNA; note = Description of Artificial Sequence: Synthetic oligonucleotide
cttttcttaaattatgtcatt

SEQ ID NO: 21690 - RNA, 21 nt, synthetic construct
  source 1..21: mol_type = other RNA; note = Description of Artificial Sequence: Synthetic oligonucleotide
ttttcttaaattatgtcaatt

SEQ ID NO: 21691 - RNA, 21 nt, synthetic construct
  source 1..21: mol_type = other RNA; note = Description of Artificial Sequence: Synthetic oligonucleotide
tttcttaaattatgtcacatt

SEQ ID NO: 21692 - RNA, 21 nt, synthetic construct
  source 1..21: mol_type = other RNA; note = Description of Artificial Sequence: Synthetic oligonucleotide
ttcttaaattatgtcactatt

SEQ ID NO: 21693 - RNA, 21 nt, synthetic construct
  source 1..21: mol_type = other RNA; note = Description of Artificial Sequence: Synthetic oligonucleotide
tcttaaattatgtcactaatt

SEQ ID NO: 21694 - RNA, 21 nt, synthetic construct
  source 1..21: mol_type = other RNA; note = Description of Artificial Sequence: Synthetic oligonucleotide
cttaaattatgtcactagatt

SEQ ID NO: 21695 - RNA, 21 nt, synthetic construct
  source 1..21: mol_type = other RNA; note = Description of Artificial Sequence: Synthetic oligonucleotide
ttaaattatgtcactagtatt

SEQ ID NO: 21696 - RNA, 21 nt, synthetic construct
  source 1..21: mol_type = other RNA; note = Description of Artificial Sequence: Synthetic oligonucleotide
taaattatgtcactagtcatt

SEQ ID NO: 21697 - RNA, 21 nt, synthetic construct
  source 1..21: mol_type = other RNA; note = Description of Artificial Sequence: Synthetic oligonucleotide
aaattatgtcactagtctatt

SEQ ID NO: 21698 - RNA, 21 nt, synthetic construct
  source 1..21: mol_type = other RNA; note = Description of Artificial Sequence: Synthetic oligonucleotide
aattatgtcactagtcttatt

SEQ ID NO: 21699 - RNA, 21 nt, synthetic construct
  source 1..21: mol_type = other RNA; note = Description of Artificial Sequence: Synthetic oligonucleotide
attatgtcactagtctttatt

SEQ ID NO: 21700 - RNA, 21 nt, synthetic construct
  source 1..21: mol_type = other RNA; note = Description of Artificial Sequence: Synthetic oligonucleotide
ttatgtcactagtcttttatt

SEQ ID NO: 21701 - RNA, 21 nt, synthetic construct
  source 1..21: mol_type = other RNA; note = Description of Artificial Sequence: Synthetic oligonucleotide
tatgtcactagtcttttaatt

SEQ ID NO: 21702 - RNA, 21 nt, synthetic construct
  source 1..21: mol_type = other RNA; note = Description of Artificial Sequence: Synthetic oligonucleotide
atgtcactagtcttttatatt

SEQ ID NO: 21703 - RNA, 21 nt, synthetic construct
  source 1..21: mol_type = other RNA; note = Description of Artificial Sequence: Synthetic oligonucleotide
tgtcactagtcttttattatt

SEQ ID NO: 21704 - RNA, 21 nt, synthetic construct
  source 1..21: mol_type = other RNA; note = Description of Artificial Sequence: Synthetic oligonucleotide
gtcactagtcttttatttatt

SEQ ID NO: 21705 - RNA, 21 nt, synthetic construct
  source 1..21: mol_type = other RNA; note = Description of Artificial Sequence: Synthetic oligonucleotide
tcactagtcttttattttatt

SEQ ID NO: 21706 - RNA, 21 nt, synthetic construct
  source 1..21: mol_type = other RNA; note = Description of Artificial Sequence: Synthetic oligonucleotide
cactagtcttttatttttatt

SEQ ID NO: 21707 - RNA, 21 nt, synthetic construct
  source 1..21: mol_type = other RNA; note = Description of Artificial Sequence: Synthetic oligonucleotide
actagtcttttattttttatt

SEQ ID NO: 21708 - RNA, 21 nt, synthetic construct
  source 1..21: mol_type = other RNA; note = Description of Artificial Sequence: Synthetic oligonucleotide
ctagtcttttattttttcatt

SEQ ID NO: 21709 - RNA, 21 nt, synthetic construct
  source 1..21: mol_type = other RNA; note = Description of Artificial Sequence: Synthetic oligonucleotide
tagtcttttattttttccatt

SEQ ID NO: 21710 - RNA, 21 nt, synthetic construct
  source 1..21: mol_type = other RNA; note = Description of Artificial Sequence: Synthetic oligonucleotide
agtcttttattttttcccatt

SEQ ID NO: 21711 - RNA, 21 nt, synthetic construct
  source 1..21: mol_type = other RNA; note = Description of Artificial Sequence: Synthetic oligonucleotide
gtcttttattttttccccatt

SEQ ID NO: 21712 - RNA, 21 nt, synthetic construct
  source 1..21: mol_type = other RNA; note = Description of Artificial Sequence: Synthetic oligonucleotide
tcttttattttttcccctatt

SEQ ID NO: 21713 - RNA, 21 nt, synthetic construct
  source 1..21: mol_type = other RNA; note = Description of Artificial Sequence: Synthetic oligonucleotide
cttttattttttcccctcatt

SEQ ID NO: 21714 - RNA, 21 nt, synthetic construct
  source 1..21: mol_type = other RNA; note = Description of Artificial Sequence: Synthetic oligonucleotide
ttttattttttcccctctatt

SEQ ID NO: 21715 - RNA, 21 nt, synthetic construct
  source 1..21: mol_type = other RNA; note = Description of Artificial Sequence: Synthetic oligonucleotide
tttattttttcccctcttatt

SEQ ID NO: 21716 - RNA, 21 nt, synthetic construct
  source 1..21: mol_type = other RNA; note = Description of Artificial Sequence: Synthetic oligonucleotide
ttattttttcccctcttgatt

SEQ ID NO: 21717 - RNA, 21 nt, synthetic construct
  source 1..21: mol_type = other RNA; note = Description of Artificial Sequence: Synthetic oligonucleotide
tattttttcccctcttgaatt

SEQ ID NO: 21718 - RNA, 21 nt, synthetic construct
  source 1..21: mol_type = other RNA; note = Description of Artificial Sequence: Synthetic oligonucleotide
attttttcccctcttgaaatt

SEQ ID NO: 21719 - RNA, 21 nt, synthetic construct
  source 1..21: mol_type = other RNA; note = Description of Artificial Sequence: Synthetic oligonucleotide
ttttttcccctcttgaacatt

SEQ ID NO: 21720 - RNA, 21 nt, synthetic construct
  source 1..21: mol_type = other RNA; note = Description of Artificial Sequence: Synthetic oligonucleotide
tttttcccctcttgaactatt

SEQ ID NO: 21721 - RNA, 21 nt, synthetic construct
  source 1..21: mol_type = other RNA; note = Description of Artificial Sequence: Synthetic oligonucleotide
ttttcccctcttgaacttatt

SEQ ID NO: 21722 - RNA, 21 nt, synthetic construct
  source 1..21: mol_type = other RNA; note = Description of Artificial Sequence: Synthetic oligonucleotide
tttcccctcttgaactttatt

SEQ ID NO: 21723 - RNA, 21 nt, synthetic construct
  source 1..21: mol_type = other RNA; note = Description of Artificial Sequence: Synthetic oligonucleotide
ttcccctcttgaactttcatt

SEQ ID NO: 21724 - RNA, 21 nt, synthetic construct
  source 1..21: mol_type = other RNA; note = Description of Artificial Sequence: Synthetic oligonucleotide
tcccctcttgaactttccatt

SEQ ID NO: 21725 - RNA, 21 nt, synthetic construct
  source 1..21: mol_type = other RNA; note = Description of Artificial Sequence: Synthetic oligonucleotide
cccctcttgaactttcctatt

SEQ ID NO: 21726 - RNA, 21 nt, synthetic construct
  source 1..21: mol_type = other RNA; note = Description of Artificial Sequence: Synthetic oligonucleotide
ccctcttgaactttcctcatt

SEQ ID NO: 21727 - RNA, 21 nt, synthetic construct
  source 1..21: mol_type = other RNA; note = Description of Artificial Sequence: Synthetic oligonucleotide
cctcttgaactttcctcaatt

SEQ ID NO: 21728 - RNA, 21 nt, synthetic construct
  source 1..21: mol_type = other RNA; note = Description of Artificial Sequence: Synthetic oligonucleotide
ctcttgaactttcctcacatt

SEQ ID NO: 21729 - RNA, 21 nt, synthetic construct
  source 1..21: mol_type = other RNA; note = Description of Artificial Sequence: Synthetic oligonucleotide
tcttgaactttcctcacaatt

SEQ ID NO: 21730 - RNA, 21 nt, synthetic construct
  source 1..21: mol_type = other RNA; note = Description of Artificial Sequence: Synthetic oligonucleotide
cttgaactttcctcacacatt

SEQ ID NO: 21731 - RNA, 21 nt, synthetic construct
  source 1..21: mol_type = other RNA; note = Description of Artificial Sequence: Synthetic oligonucleotide
ttgaactttcctcacaccatt

SEQ ID NO: 21732 - RNA, 21 nt, synthetic construct
  source 1..21: mol_type = other RNA; note = Description of Artificial Sequence: Synthetic oligonucleotide
tgaactttcctcacacctatt

SEQ ID NO: 21733 - RNA, 21 nt, synthetic construct
  source 1..21: mol_type = other RNA; note = Description of Artificial Sequence: Synthetic oligonucleotide
gaactttcctcacacctgatt

SEQ ID NO: 21734 - RNA, 21 nt, synthetic construct
  source 1..21: mol_type = other RNA; note = Description of Artificial Sequence: Synthetic oligonucleotide
aactttcctcacacctggatt

SEQ ID NO: 21735 - RNA, 21 nt, synthetic construct
  source 1..21: mol_type = other RNA; note = Description of Artificial Sequence: Synthetic oligonucleotide
actttcctcacacctggaatt

SEQ ID NO: 21736 - RNA, 21 nt, synthetic construct
  source 1..21: mol_type = other RNA; note = Description of Artificial Sequence: Synthetic oligonucleotide
ctttcctcacacctggaaatt

SEQ ID NO: 21737 - RNA, 21 nt, synthetic construct
  source 1..21: mol_type = other RNA; note = Description of Artificial Sequence: Synthetic oligonucleotide
tttcctcacacctggaagatt

SEQ ID NO: 21738 - RNA, 21 nt, synthetic construct
  source 1..21: mol_type = other RNA; note = Description of Artificial Sequence: Synthetic oligonucleotide
ttcctcacacctggaagaatt

SEQ ID NO: 21739 - RNA, 21 nt, synthetic construct
  source 1..21: mol_type = other RNA; note = Description of Artificial Sequence: Synthetic oligonucleotide
tcctcacacctggaagaaatt

SEQ ID NO: 21740 - RNA, 21 nt, synthetic construct
  source 1..21: mol_type = other RNA; note = Description of Artificial Sequence: Synthetic oligonucleotide
cctcacacctggaagaaaatt

SEQ ID NO: 21741 - RNA, 21 nt, synthetic construct
  source 1..21: mol_type = other RNA; note = Description of Artificial Sequence: Synthetic oligonucleotide
ctcacacctggaagaaacatt

SEQ ID NO: 21742 - RNA, 21 nt, synthetic construct
  source 1..21: mol_type = other RNA; note = Description of Artificial Sequence: Synthetic oligonucleotide
tcacacctggaagaaacaatt

SEQ ID NO: 21743 - RNA, 21 nt, synthetic construct
  source 1..21: mol_type = other RNA; note = Description of Artificial Sequence: Synthetic oligonucleotide
cacacctggaagaaacaaatt

SEQ ID NO: 21744 - RNA, 21 nt, synthetic construct
  source 1..21: mol_type = other RNA; note = Description of Artificial Sequence: Synthetic oligonucleotide
acacctggaagaaacaaaatt

SEQ ID NO: 21745 - RNA, 21 nt, synthetic construct
  source 1..21: mol_type = other RNA; note = Description of Artificial Sequence: Synthetic oligonucleotide
cacctggaagaaacaaagatt

SEQ ID NO: 21746 - RNA, 21 nt, synthetic construct
  source 1..21: mol_type = other RNA; note = Description of Artificial Sequence: Synthetic oligonucleotide
acctggaagaaacaaagtatt

SEQ ID NO: 21747 - RNA, 21 nt, synthetic construct
  source 1..21: mol_type = other RNA; note = Description of Artificial Sequence: Synthetic oligonucleotide
cctggaagaaacaaagtaatt

SEQ ID NO: 21748 - RNA, 21 nt, synthetic construct
  source 1..21: mol_type = other RNA; note = Description of Artificial Sequence: Synthetic oligonucleotide
ctggaagaaacaaagtagatt

SEQ ID NO: 21749 - RNA, 21 nt, synthetic construct
  source 1..21: mol_type = other RNA; note = Description of Artificial Sequence: Synthetic oligonucleotide
tggaagaaacaaagtaggatt

SEQ ID NO: 21750 - RNA, 21 nt, synthetic construct
  source 1..21: mol_type = other RNA; note = Description of Artificial Sequence: Synthetic oligonucleotide
ggaagaaacaaagtaggaatt

SEQ ID NO: 21751 - RNA, 21 nt, synthetic construct
  source 1..21: mol_type = other RNA; note = Description of Artificial Sequence: Synthetic oligonucleotide
gaagaaacaaagtaggaaatt

SEQ ID NO: 21752 - RNA, 21 nt, synthetic construct
  source 1..21: mol_type = other RNA; note = Description of Artificial Sequence: Synthetic oligonucleotide
aagaaacaaagtaggaaaatt

SEQ ID NO: 21753 - RNA, 21 nt, synthetic construct
  source 1..21: mol_type = other RNA; note = Description of Artificial Sequence: Synthetic oligonucleotide
agaaacaaagtaggaaaaatt

SEQ ID NO: 21754 - RNA, 21 nt, synthetic construct
  source 1..21: mol_type = other RNA; note = Description of Artificial Sequence: Synthetic oligonucleotide
gaaacaaagtaggaaaaaatt

SEQ ID NO: 21755 - RNA, 21 nt, synthetic construct
  source 1..21: mol_type = other RNA; note = Description of Artificial Sequence: Synthetic oligonucleotide
aaacaaagtaggaaaaagatt

SEQ ID NO: 21756 - RNA, 21 nt, synthetic construct
  source 1..21: mol_type = other RNA; note = Description of Artificial Sequence: Synthetic oligonucleotide
aacaaagtaggaaaaagtatt

SEQ ID NO: 21757 - RNA, 21 nt, synthetic construct
  source 1..21: mol_type = other RNA; note = Description of Artificial Sequence: Synthetic oligonucleotide
acaaagtaggaaaaagtgatt

SEQ ID NO: 21758 - RNA, 21 nt, synthetic construct
  source 1..21: mol_type = other RNA; note = Description of Artificial Sequence: Synthetic oligonucleotide
caaagtaggaaaaagtgaatt

SEQ ID NO: 21759 - RNA, 21 nt, synthetic construct
  source 1..21: mol_type = other RNA; note = Description of Artificial Sequence: Synthetic oligonucleotide
aaagtaggaaaaagtgaaatt

SEQ ID NO: 21760 - RNA, 21 nt, synthetic construct
  source 1..21: mol_type = other RNA; note = Description of Artificial Sequence: Synthetic oligonucleotide
aagtaggaaaaagtgaacatt

SEQ ID NO: 21761 - RNA, 21 nt, synthetic construct
  source 1..21: mol_type = other RNA; note = Description of Artificial Sequence: Synthetic oligonucleotide
agtaggaaaaagtgaacaatt

SEQ ID NO: 21762 - RNA, 21 nt, synthetic construct
  source 1..21: mol_type = other RNA; note = Description of Artificial Sequence: Synthetic oligonucleotide
gtaggaaaaagtgaacagatt

SEQ ID NO: 21763 - RNA, 21 nt, synthetic construct
  source 1..21: mol_type = other RNA; note = Description of Artificial Sequence: Synthetic oligonucleotide
taggaaaaagtgaacaggatt

SEQ ID NO: 21764 - RNA, 21 nt, synthetic construct
  source 1..21: mol_type = other RNA; note = Description of Artificial Sequence: Synthetic oligonucleotide
aggaaaaagtgaacagggatt

SEQ ID NO: 21765 - RNA, 21 nt, synthetic construct
  source 1..21: mol_type = other RNA; note = Description of Artificial Sequence: Synthetic oligonucleotide
ggaaaaagtgaacaggggatt

SEQ ID NO: 21766 - RNA, 21 nt, synthetic construct
  source 1..21: mol_type = other RNA; note = Description of Artificial Sequence: Synthetic oligonucleotide
gaaaaagtgaacaggggaatt

SEQ ID NO: 21767 - RNA, 21 nt, synthetic construct
  source 1..21: mol_type = other RNA; note = Description of Artificial Sequence: Synthetic oligonucleotide
aaaaagtgaacaggggatatt

SEQ ID NO: 21768 - RNA, 21 nt, synthetic construct
  source 1..21: mol_type = other RNA; note = Description of Artificial Sequence: Synthetic oligonucleotide
aaaagtgaacaggggatgatt

SEQ ID NO: 21769 - RNA, 21 nt, synthetic construct
  source 1..21: mol_type = other RNA; note = Description of Artificial Sequence: Synthetic oligonucleotide
aaagtgaacaggggatgtatt

SEQ ID NO: 21770 - RNA, 21 nt, synthetic construct
  source 1..21: mol_type = other RNA; note = Description of Artificial Sequence: Synthetic oligonucleotide
aagtgaacaggggatgtcatt

SEQ ID NO: 21771 - RNA, 21 nt, synthetic construct
  source 1..21: mol_type = other RNA; note = Description of Artificial Sequence: Synthetic oligonucleotide
agtgaacaggggatgtcaatt

SEQ ID NO: 21772 - RNA, 21 nt, synthetic construct
  source 1..21: mol_type = other RNA; note = Description of Artificial Sequence: Synthetic oligonucleotide
gtgaacaggggatgtcaaatt

SEQ ID NO: 21773 - RNA, 21 nt, synthetic construct
  source 1..21: mol_type = other RNA; note = Description of Artificial Sequence: Synthetic oligonucleotide
tgaacaggggatgtcaaaatt

SEQ ID NO: 21774 - RNA, 21 nt, synthetic construct
  source 1..21: mol_type = other RNA; note = Description of Artificial Sequence: Synthetic oligonucleotide
gaacaggggatgtcaaatatt

SEQ ID NO: 21775 - RNA, 21 nt, synthetic construct
  source 1..21: mol_type = other RNA; note = Description of Artificial Sequence: Synthetic oligonucleotide
aacaggggatgtcaaatcatt

SEQ ID NO: 21776 - RNA, 21 nt, synthetic construct
  source 1..21: mol_type = other RNA; note = Description of Artificial Sequence: Synthetic oligonucleotide
acaggggatgtcaaatcgatt

SEQ ID NO: 21777 - RNA, 21 nt, synthetic construct
  source 1..21: mol_type = other RNA; note = Description of Artificial Sequence: Synthetic oligonucleotide
caggggatgtcaaatcgaatt

SEQ ID NO: 21778 - RNA, 21 nt, synthetic construct
  source 1..21: mol_type = other RNA; note = Description of Artificial Sequence: Synthetic oligonucleotide
aggggatgtcaaatcgatatt

SEQ ID NO: 21779 - RNA, 21 nt, synthetic construct
  source 1..21: mol_type = other RNA; note = Description of Artificial Sequence: Synthetic oligonucleotide
ggggatgtcaaatcgattatt

SEQ ID NO: 21780 - RNA, 21 nt, synthetic construct
  source 1..21: mol_type = other RNA; note = Description of Artificial Sequence: Synthetic oligonucleotide
gggatgtcaaatcgattcatt

SEQ ID NO: 21781 - RNA, 21 nt, synthetic construct
  source 1..21: mol_type = other RNA; note = Description of Artificial Sequence: Synthetic oligonucleotide
ggatgtcaaatcgattctatt

SEQ ID NO: 21782 - RNA, 21 nt, synthetic construct
  source 1..21: mol_type = other RNA; note = Description of Artificial Sequence: Synthetic oligonucleotide
gatgtcaaatcgattcttatt

SEQ ID NO: 21783 - RNA, 21 nt, synthetic construct
  source 1..21: mol_type = other RNA; note = Description of Artificial Sequence: Synthetic oligonucleotide
atgtcaaatcgattcttgatt

SEQ ID NO: 21784 - RNA, 21 nt, synthetic construct
  source 1..21: mol_type = other RNA; note = Description of Artificial Sequence: Synthetic oligonucleotide
tgtcaaatcgattcttgaatt

SEQ ID NO: 21785 - RNA, 21 nt, synthetic construct
  source 1..21: mol_type = other RNA; note = Description of Artificial Sequence: Synthetic oligonucleotide
gtcaaatcgattcttgaaatt

SEQ ID NO: 21786 - RNA, 21 nt, synthetic construct
  source 1..21: mol_type = other RNA; note = Description of Artificial Sequence: Synthetic oligonucleotide
tcaaatcgattcttgaatatt

SEQ ID NO: 21787 - RNA, 21 nt, synthetic construct
  source 1..21: mol_type = other RNA; note = Description of Artificial Sequence: Synthetic oligonucleotide
caaatcgattcttgaattatt

SEQ ID NO: 21788 - RNA, 21 nt, synthetic construct
  source 1..21: mol_type = other RNA; note = Description of Artificial Sequence: Synthetic oligonucleotide
aaatcgattcttgaattcatt

SEQ ID NO: 21789 - RNA, 21 nt, synthetic construct
  source 1..21: mol_type = other RNA; note = Description of Artificial Sequence: Synthetic oligonucleotide
aatcgattcttgaattccatt

SEQ ID NO: 21790 - RNA, 21 nt, synthetic construct
  source 1..21: mol_type = other RNA; note = Description of Artificial Sequence: Synthetic oligonucleotide
atcgattcttgaattcccatt

SEQ ID NO: 21791 - RNA, 21 nt, synthetic construct
  source 1..21: mol_type = other RNA; note = Description of Artificial Sequence: Synthetic oligonucleotide
tcgattcttgaattcccgatt

SEQ ID NO: 21792 - RNA, 21 nt, synthetic construct
  source 1..21: mol_type = other RNA; note = Description of Artificial Sequence: Synthetic oligonucleotide
cgattcttgaattcccgcatt

SEQ ID NO: 21793 - RNA, 21 nt, synthetic construct
  source 1..21: mol_type = other RNA; note = Description of Artificial Sequence: Synthetic oligonucleotide
gattcttgaattcccgctatt

SEQ ID NO: 21794 - RNA, 21 nt, synthetic construct
  source 1..21: mol_type = other RNA; note = Description of Artificial Sequence: Synthetic oligonucleotide
attcttgaattcccgctgatt

SEQ ID NO: 21795 - RNA, 21 nt, synthetic construct
  source 1..21: mol_type = other RNA; note = Description of Artificial Sequence: Synthetic oligonucleotide
ttcttgaattcccgctgcatt

SEQ ID NO: 21796 - RNA, 21 nt, synthetic construct
  source 1..21: mol_type = other RNA; note = Description of Artificial Sequence: Synthetic oligonucleotide
tcttgaattcccgctgcaatt

SEQ ID NO: 21797 - RNA, 21 nt, synthetic construct
  source 1..21: mol_type = other RNA; note = Description of Artificial Sequence: Synthetic oligonucleotide
cttgaattcccgctgcaaatt

SEQ ID NO: 21798 - RNA, 21 nt, synthetic construct
  source 1..21: mol_type = other RNA; note = Description of Artificial Sequence: Synthetic oligonucleotide
ttgaattcccgctgcaagatt

SEQ ID NO: 21799 - RNA, 21 nt, synthetic construct
  source 1..21: mol_type = other RNA; note = Description of Artificial Sequence: Synthetic oligonucleotide
tgaattcccgctgcaagcatt

SEQ ID NO: 21800 - RNA, 21 nt, synthetic construct
  source 1..21: mol_type = other RNA; note = Description of Artificial Sequence: Synthetic oligonucleotide
gaattcccgctgcaagctatt

SEQ ID NO: 21801 - RNA, 21 nt, synthetic construct
  source 1..21: mol_type = other RNA; note = Description of Artificial Sequence: Synthetic oligonucleotide
aattcccgctgcaagctaatt

SEQ ID NO: 21802 - RNA, 21 nt, synthetic construct
  source 1..21: mol_type = other RNA; note = Description of Artificial Sequence: Synthetic oligonucleotide
attcccgctgcaagctagatt

SEQ ID NO: 21803 - RNA, 21 nt, synthetic construct
  source 1..21: mol_type = other RNA; note = Description of Artificial Sequence: Synthetic oligonucleotide
ttcccgctgcaagctagaatt

SEQ ID NO: 21804 - RNA, 21 nt, synthetic construct
  source 1..21: mol_type = other RNA; note = Description of Artificial Sequence: Synthetic oligonucleotide
tcccgctgcaagctagagatt

SEQ ID NO: 21805 - RNA, 21 nt, synthetic construct
  source 1..21: mol_type = other RNA; note = Description of Artificial Sequence: Synthetic oligonucleotide
cccgctgcaagctagagcatt

SEQ ID NO: 21806 - RNA, 21 nt, synthetic construct
  source 1..21: mol_type = other RNA; note = Description of Artificial Sequence: Synthetic oligonucleotide
ccgctgcaagctagagccatt

SEQ ID NO: 21807 - RNA, 21 nt, synthetic construct
  source 1..21: mol_type = other RNA; note = Description of Artificial Sequence: Synthetic oligonucleotide
cgctgcaagctagagccgatt

SEQ ID NO: 21808 - RNA, 21 nt, synthetic construct
  source 1..21: mol_type = other RNA; note = Description of Artificial Sequence: Synthetic oligonucleotide
gctgcaagctagagccgcatt

SEQ ID NO: 21809 - RNA, 21 nt, synthetic construct
  source 1..21: mol_type = other RNA; note = Description of Artificial Sequence: Synthetic oligonucleotide
ctgcaagctagagccgcaatt

SEQ ID NO: 21810 - RNA, 21 nt, synthetic construct
  source 1..21: mol_type = other RNA; note = Description of Artificial Sequence: Synthetic oligonucleotide
tgcaagctagagccgcagatt

SEQ ID NO: 21811 - RNA, 21 nt, synthetic construct
  source 1..21: mol_type = other RNA; note = Description of Artificial Sequence: Synthetic oligonucleotide
gcaagctagagccgcaggatt

SEQ ID NO: 21812 - RNA, 21 nt, synthetic construct
  source 1..21: mol_type = other RNA; note = Description of Artificial Sequence: Synthetic oligonucleotide
caagctagagccgcaggcatt

SEQ ID NO: 21813 - RNA, 21 nt, synthetic construct
  source 1..21: mol_type = other RNA; note = Description of Artificial Sequence: Synthetic oligonucleotide
aagctagagccgcaggcaatt

SEQ ID NO: 21814 - RNA, 21 nt, synthetic construct
  source 1..21: mol_type = other RNA; note = Description of Artificial Sequence: Synthetic oligonucleotide
agctagagccgcaggcacatt

SEQ ID NO: 21815 - RNA, 21 nt, synthetic construct
  source 1..21: mol_type = other RNA; note = Description of Artificial Sequence: Synthetic oligonucleotide
gctagagccgcaggcaccatt

SEQ ID NO: 21816 - RNA, 21 nt, synthetic construct
  source 1..21: mol_type = other RNA; note = Description of Artificial Sequence: Synthetic oligonucleotide
ctagagccgcaggcacccatt

SEQ ID NO: 21817 - RNA, 21 nt, synthetic construct
  source 1..21: mol_type = other RNA; note = Description of Artificial Sequence: Synthetic oligonucleotide
tagagccgcaggcaccctatt

SEQ ID NO: 21818 - RNA, 21 nt, synthetic construct
  source 1..21: mol_type = other RNA; note = Description of Artificial Sequence: Synthetic oligonucleotide
agagccgcaggcaccctcatt

SEQ ID NO: 21819 - RNA, 21 nt, synthetic construct
  source 1..21: mol_type = other RNA; note = Description of Artificial Sequence: Synthetic oligonucleotide
gagccgcaggcaccctctatt

SEQ ID NO: 21820 - RNA, 21 nt, synthetic construct
  source 1..21: mol_type = other RNA; note = Description of Artificial Sequence: Synthetic oligonucleotide
agccgcaggcaccctctcatt

SEQ ID NO: 21821 - RNA, 21 nt, synthetic construct
  source 1..21: mol_type = other RNA; note = Description of Artificial Sequence: Synthetic oligonucleotide
gccgcaggcaccctctcaatt

SEQ ID NO: 21822 - RNA, 21 nt, synthetic construct
  source 1..21: mol_type = other RNA; note = Description of Artificial Sequence: Synthetic oligonucleotide
ccgcaggcaccctctcacatt

SEQ ID NO: 21823 - RNA, 21 nt, synthetic construct
  source 1..21: mol_type = other RNA; note = Description of Artificial Sequence: Synthetic oligonucleotide
cgcaggcaccctctcactatt

SEQ ID NO: 21824 - RNA, 21 nt, synthetic construct
  source 1..21: mol_type = other RNA; note = Description of Artificial Sequence: Synthetic oligonucleotide
gcaggcaccctctcactcatt

SEQ ID NO: 21825 - RNA, 21 nt, synthetic construct
  source 1..21: mol_type = other RNA; note = Description of Artificial Sequence: Synthetic oligonucleotide
caggcaccctctcactcaatt

SEQ ID NO: 21826 - RNA, 21 nt, synthetic construct
  source 1..21: mol_type = other RNA; note = Description of Artificial Sequence: Synthetic oligonucleotide
aggcaccctctcactcaaatt

SEQ ID NO: 21827 - RNA, 21 nt, synthetic construct
  source 1..21: mol_type = other RNA; note = Description of Artificial Sequence: Synthetic oligonucleotide
ggcaccctctcactcaatatt

SEQ ID NO: 21828 - RNA, 21 nt, synthetic construct
  source 1..21: mol_type = other RNA; note = Description of Artificial Sequence: Synthetic oligonucleotide
gcaccctctcactcaattatt

SEQ ID NO: 21829 - RNA, 21 nt, synthetic construct
  source 1..21: mol_type = other RNA; note = Description of Artificial Sequence: Synthetic oligonucleotide
caccctctcactcaatttatt

SEQ ID NO: 21830 - RNA, 21 nt, synthetic construct
  source 1..21: mol_type = other RNA; note = Description of Artificial Sequence: Synthetic oligonucleotide
accctctcactcaatttcatt

SEQ ID NO: 21831 - RNA, 21 nt, synthetic construct
  source 1..21: mol_type = other RNA; note = Description of Artificial Sequence: Synthetic oligonucleotide
ccctctcactcaatttccatt

SEQ ID NO: 21832 - RNA, 21 nt, synthetic construct
  source 1..21: mol_type = other RNA; note = Description of Artificial Sequence: Synthetic oligonucleotide
cctctcactcaatttccaatt

SEQ ID NO: 21833 - RNA, 21 nt, synthetic construct
  source 1..21: mol_type = other RNA; note = Description of Artificial Sequence: Synthetic oligonucleotide
ctctcactcaatttccacatt

SEQ ID NO: 21834 - RNA, 21 nt, synthetic construct
  source 1..21: mol_type = other RNA; note = Description of Artificial Sequence: Synthetic oligonucleotide
tctcactcaatttccactatt

SEQ ID NO: 21835 - RNA, 21 nt, synthetic construct
  source 1..21: mol_type = other RNA; note = Description of Artificial Sequence: Synthetic oligonucleotide
ctcactcaatttccactcatt

SEQ ID NO: 21836 - RNA, 21 nt, synthetic construct
  source 1..21: mol_type = other RNA; note = Description of Artificial Sequence: Synthetic oligonucleotide
tcactcaatttccactcaatt

SEQ ID NO: 21837 - RNA, 21 nt, synthetic construct
  source 1..21: mol_type = other RNA; note = Description of Artificial Sequence: Synthetic oligonucleotide
cactcaatttccactcagatt

SEQ ID NO: 21838 - RNA, 21 nt, synthetic construct
  source 1..21: mol_type = other RNA; note = Description of Artificial Sequence: Synthetic oligonucleotide
actcaatttccactcagaatt

SEQ ID NO: 21839 - RNA, 21 nt, synthetic construct
  source 1..21: mol_type = other RNA; note = Description of Artificial Sequence: Synthetic oligonucleotide
ctcaatttccactcagaaatt

SEQ ID NO: 21840 - RNA, 21 nt, synthetic construct
  source 1..21: mol_type = other RNA; note = Description of Artificial Sequence: Synthetic oligonucleotide
tcaatttccactcagaacatt

SEQ ID NO: 21841 - RNA, 21 nt, synthetic construct
  source 1..21: mol_type = other RNA; note = Description of Artificial Sequence: Synthetic oligonucleotide
caatttccactcagaaccatt

SEQ ID NO: 21842 - RNA, 21 nt, synthetic construct
  source 1..21: mol_type = other RNA; note = Description of Artificial Sequence: Synthetic oligonucleotide
aatttccactcagaacccatt

SEQ ID NO: 21843 - RNA, 21 nt, synthetic construct
  source 1..21: mol_type = other RNA; note = Description of Artificial Sequence: Synthetic oligonucleotide
atttccactcagaaccctatt

SEQ ID NO: 21844 - RNA, 21 nt, synthetic construct
  source 1..21: mol_type = other RNA; note = Description of Artificial Sequence: Synthetic oligonucleotide
tttccactcagaaccctaatt

SEQ ID NO: 21845 - RNA, 21 nt, synthetic construct
  source 1..21: mol_type = other RNA; note = Description of Artificial Sequence: Synthetic oligonucleotide
ttccactcagaaccctatatt

SEQ ID NO: 21846 - RNA, 21 nt, synthetic construct
  source 1..21: mol_type = other RNA; note = Description of Artificial Sequence: Synthetic oligonucleotide
tccactcagaaccctataatt

SEQ ID NO: 21847 - RNA, 21 nt, synthetic construct
  source 1..21: mol_type = other RNA; note = Description of Artificial Sequence: Synthetic oligonucleotide
ccactcagaaccctataaatt

SEQ ID NO: 21848 - RNA, 21 nt, synthetic construct
  source 1..21: mol_type = other RNA; note = Description of Artificial Sequence: Synthetic oligonucleotide
cactcagaaccctataaaatt

SEQ ID NO: 21849 - RNA, 21 nt, synthetic construct
  source 1..21: mol_type = other RNA; note = Description of Artificial Sequence: Synthetic oligonucleotide
actcagaaccctataaacatt

SEQ ID NO: 21850 - RNA, 21 nt, synthetic construct
  source 1..21: mol_type = other RNA; note = Description of Artificial Sequence: Synthetic oligonucleotide
ctcagaaccctataaacaatt

SEQ ID NO: 21851 - RNA, 21 nt, synthetic construct
  source 1..21: mol_type = other RNA; note = Description of Artificial Sequence: Synthetic oligonucleotide
tcagaaccctataaacacatt

SEQ ID NO: 21852 - RNA, 21 nt, synthetic construct
  source 1..21: mol_type = other RNA; note = Description of Artificial Sequence: Synthetic oligonucleotide
cagaaccctataaacaccatt

SEQ ID NO: 21853 - RNA, 21 nt, synthetic construct
  source 1..21: mol_type = other RNA; note = Description of Artificial Sequence: Synthetic oligonucleotide
agaaccctataaacaccaatt

SEQ ID NO: 21854 - RNA, 21 nt, synthetic construct
  source 1..21: mol_type = other RNA; note = Description of Artificial Sequence: Synthetic oligonucleotide
gaaccctataaacaccagatt

SEQ ID NO: 21855 - RNA, 21 nt, synthetic construct
  source 1..21: mol_type = other RNA; note = Description of Artificial Sequence: Synthetic oligonucleotide
aaccctataaacaccagtatt

SEQ ID NO: 21856 - RNA, 21 nt, synthetic construct
  source 1..21: mol_type = other RNA; note = Description of Artificial Sequence: Synthetic oligonucleotide
accctataaacaccagtgatt

SEQ ID NO: 21857 - RNA, 21 nt, synthetic construct
  source 1..21: mol_type = other RNA; note = Description of Artificial Sequence: Synthetic oligonucleotide
ccctataaacaccagtggatt

SEQ ID NO: 21858 - RNA, 21 nt, synthetic construct
  source 1..21: mol_type = other RNA; note = Description of Artificial Sequence: Synthetic oligonucleotide
cctataaacaccagtgggatt

SEQ ID NO: 21859 - RNA, 21 nt, synthetic construct
  source 1..21: mol_type = other RNA; note = Description of Artificial Sequence: Synthetic oligonucleotide
ctataaacaccagtgggaatt

SEQ ID NO: 21860 - RNA, 21 nt, synthetic construct
  source 1..21: mol_type = other RNA; note = Description of Artificial Sequence: Synthetic oligonucleotide
tataaacaccagtgggaaatt

SEQ ID NO: 21861 - RNA, 21 nt, synthetic construct
  source 1..21: mol_type = other RNA; note = Description of Artificial Sequence: Synthetic oligonucleotide
ataaacaccagtgggaagatt

SEQ ID NO: 21862 - RNA, 21 nt, synthetic construct
  source 1..21: mol_type = other RNA; note = Description of Artificial Sequence: Synthetic oligonucleotide
taaacaccagtgggaaggatt

SEQ ID NO: 21863 - RNA, 21 nt, synthetic construct
  source 1..21: mol_type = other RNA; note = Description of Artificial Sequence: Synthetic oligonucleotide
aaacaccagtgggaagggatt

SEQ ID NO: 21864 - RNA, 21 nt, synthetic construct
  source 1..21: mol_type = other RNA; note = Description of Artificial Sequence: Synthetic oligonucleotide
aacaccagtgggaagggcatt

SEQ ID NO: 21865 - RNA, 21 nt, synthetic construct
  source 1..21: mol_type = other RNA; note = Description of Artificial Sequence: Synthetic oligonucleotide
acaccagtgggaagggcaatt

SEQ ID NO: 21866 - RNA, 21 nt, synthetic construct
  source 1..21: mol_type = other RNA; note = Description of Artificial Sequence: Synthetic oligonucleotide
caccagtgggaagggcaaatt

SEQ ID NO: 21867 - RNA, 21 nt, synthetic construct
  source 1..21: mol_type = other RNA; note = Description of Artificial Sequence: Synthetic oligonucleotide
accagtgggaagggcaacatt

SEQ ID NO: 21868 - RNA, 21 nt, synthetic construct
  source 1..21: mol_type = other RNA; note = Description of Artificial Sequence: Synthetic oligonucleotide
ccagtgggaagggcaaccatt

SEQ ID NO: 21869 - RNA, 21 nt, synthetic construct
  source 1..21: mol_type = other RNA; note = Description of Artificial Sequence: Synthetic oligonucleotide
cagtgggaagggcaacccatt

SEQ ID NO: 21870 - RNA, 21 nt, synthetic construct
  source 1..21: mol_type = other RNA; note = Description of Artificial Sequence: Synthetic oligonucleotide
agtgggaagggcaacccaatt

SEQ ID NO: 21871 - RNA, 21 nt, synthetic construct
  source 1..21: mol_type = other RNA; note = Description of Artificial Sequence: Synthetic oligonucleotide
gtgggaagggcaacccacatt

SEQ ID NO: 21872 - RNA, 21 nt, synthetic construct
  source 1..21: mol_type = other RNA; note = Description of Artificial Sequence: Synthetic oligonucleotide
tgggaagggcaacccactatt

SEQ ID NO: 21873 - RNA, 21 nt, synthetic construct
  source 1..21: mol_type = other RNA; note = Description of Artificial Sequence: Synthetic oligonucleotide
gggaagggcaacccactgatt

SEQ ID NO: 21874 - RNA, 21 nt, synthetic construct
  source 1..21: mol_type = other RNA; note = Description of Artificial Sequence: Synthetic oligonucleotide
ggaagggcaacccactgcatt

SEQ ID NO: 21875 - RNA, 21 nt, synthetic construct
  source 1..21: mol_type = other RNA; note = Description of Artificial Sequence: Synthetic oligonucleotide
gaagggcaacccactgcaatt

SEQ ID NO: 21876 - RNA, 21 nt, synthetic construct
  source 1..21: mol_type = other RNA; note = Description of Artificial Sequence: Synthetic oligonucleotide
aagggcaacccactgcacatt

SEQ ID NO: 21877 - RNA, 21 nt, synthetic construct
  source 1..21: mol_type = other RNA; note = Description of Artificial Sequence: Synthetic oligonucleotide
agggcaacccactgcacgatt

SEQ ID NO: 21878 - RNA, 21 nt, synthetic construct
  source 1..21: mol_type = other RNA; note = Description of Artificial Sequence: Synthetic oligonucleotide
gggcaacccactgcacgtatt

SEQ ID NO: 21879 - RNA, 21 nt, synthetic construct
  source 1..21: mol_type = other RNA; note = Description of Artificial Sequence: Synthetic oligonucleotide
ggcaacccactgcacgtgatt

SEQ ID NO: 21880 - RNA, 21 nt, synthetic construct
  source 1..21: mol_type = other RNA; note = Description of Artificial Sequence: Synthetic oligonucleotide
gcaacccactgcacgtggatt

SEQ ID NO: 21881 - RNA, 21 nt, synthetic construct
  source 1..21: mol_type = other RNA; note = Description of Artificial Sequence: Synthetic oligonucleotide
caacccactgcacgtgggatt

SEQ ID NO: 21882 - RNA, 21 nt, synthetic construct
  source 1..21: mol_type = other RNA; note = Description of Artificial Sequence: Synthetic oligonucleotide
aacccactgcacgtgggaatt

SEQ ID NO: 21883 - RNA, 21 nt, synthetic construct
  source 1..21: mol_type = other RNA; note = Description of Artificial Sequence: Synthetic oligonucleotide
acccactgcacgtgggaaatt

SEQ ID NO: 21884 - RNA, 21 nt, synthetic construct
  source 1..21: mol_type = other RNA; note = Description of Artificial Sequence: Synthetic oligonucleotide
cccactgcacgtgggaatatt

SEQ ID NO: 21885 - RNA, 21 nt, synthetic construct
  source 1..21: mol_type = other RNA; note = Description of Artificial Sequence: Synthetic oligonucleotide
ccactgcacgtgggaatgatt

SEQ ID NO: 21886 - RNA, 21 nt, synthetic construct
  source 1..21: mol_type = other RNA; note = Description of Artificial Sequence: Synthetic oligonucleotide
cactgcacgtgggaatgcatt

SEQ ID NO: 21887 - RNA, 21 nt, synthetic construct
  source 1..21: mol_type = other RNA; note = Description of Artificial Sequence: Synthetic oligonucleotide
actgcacgtgggaatgcaatt

SEQ ID NO: 21888 - RNA, 21 nt, synthetic construct
  source 1..21: mol_type = other RNA; note = Description of Artificial Sequence: Synthetic oligonucleotide
ctgcacgtgggaatgcacatt

SEQ ID NO: 21889 - RNA, 21 nt, synthetic construct
  source 1..21: mol_type = other RNA; note = Description of Artificial Sequence: Synthetic oligonucleotide
tgcacgtgggaatgcactatt

SEQ ID NO: 21890 - RNA, 21 nt, synthetic construct
  source 1..21: mol_type = other RNA; note = Description of Artificial Sequence: Synthetic oligonucleotide
gcacgtgggaatgcactgatt

SEQ ID NO: 21891 - RNA, 21 nt, synthetic construct
  source 1..21: mol_type = other RNA; note = Description of Artificial Sequence: Synthetic oligonucleotide
cacgtgggaatgcactgaatt

SEQ ID NO: 21892 - RNA, 21 nt, synthetic construct
  source 1..21: mol_type = other RNA; note = Description of Artificial Sequence: Synthetic oligonucleotide
acgtgggaatgcactgatatt

SEQ ID NO: 21893 - RNA, 21 nt, synthetic construct
  source 1..21: mol_type = other RNA; note = Description of Artificial Sequence: Synthetic oligonucleotide
cgtgggaatgcactgattatt

SEQ ID NO: 21894 - RNA, 21 nt, synthetic construct
  source 1..21: mol_type = other RNA; note = Description of Artificial Sequence: Synthetic oligonucleotide
gtgggaatgcactgatttatt

SEQ ID NO: 21895 - RNA, 21 nt, synthetic construct
  source 1..21: mol_type = other RNA; note = Description of Artificial Sequence: Synthetic oligonucleotide
tgggaatgcactgattttatt

SEQ ID NO: 21896 - RNA, 21 nt, synthetic construct
  source 1..21: mol_type = other RNA; note = Description of Artificial Sequence: Synthetic oligonucleotide
gggaatgcactgatttttatt

SEQ ID NO: 21897 - RNA, 21 nt, synthetic construct
  source 1..21: mol_type = other RNA; note = Description of Artificial Sequence: Synthetic oligonucleotide
ggaatgcactgatttttcatt

SEQ ID NO: 21898 - RNA, 21 nt, synthetic construct
  source 1..21: mol_type = other RNA; note = Description of Artificial Sequence: Synthetic oligonucleotide
gaatgcactgatttttccatt

SEQ ID NO: 21899 - RNA, 21 nt, synthetic construct
  source 1..21: mol_type = other RNA; note = Description of Artificial Sequence: Synthetic oligonucleotide
aatgcactgatttttcctatt

SEQ ID NO: 21900 - RNA, 21 nt, synthetic construct
  source 1..21: mol_type = other RNA; note = Description of Artificial Sequence: Synthetic oligonucleotide
atgcactgatttttcctaatt

SEQ ID NO: 21901 - RNA, 21 nt, synthetic construct
  source 1..21: mol_type = other RNA; note = Description of Artificial Sequence: Synthetic oligonucleotide
tgcactgatttttcctagatt

SEQ ID NO: 21902 - RNA, 21 nt, synthetic construct
  source 1..21: mol_type = other RNA; note = Description of Artificial Sequence: Synthetic oligonucleotide
gcactgatttttcctaggatt

SEQ ID NO: 21903 - RNA, 21 nt, synthetic construct
  source 1..21: mol_type = other RNA; note = Description of Artificial Sequence: Synthetic oligonucleotide
cactgatttttcctaggaatt

SEQ ID NO: 21904 - RNA, 21 nt, synthetic construct
  source 1..21: mol_type = other RNA; note = Description of Artificial Sequence: Synthetic oligonucleotide
actgatttttcctaggagatt

SEQ ID NO: 21905 - RNA, 21 nt, synthetic construct
  source 1..21: mol_type = other RNA; note = Description of Artificial Sequence: Synthetic oligonucleotide
ctgatttttcctaggagtatt

SEQ ID NO: 21906 - RNA, 21 nt, synthetic construct
  source 1..21: mol_type = other RNA; note = Description of Artificial Sequence: Synthetic oligonucleotide
tgatttttcctaggagtaatt

SEQ ID NO: 21907 - RNA, 21 nt, synthetic construct
  source 1..21: mol_type = other RNA; note = Description of Artificial Sequence: Synthetic oligonucleotide
gatttttcctaggagtagatt

SEQ ID NO: 21908 - RNA, 21 nt, synthetic construct
  source 1..21: mol_type = other RNA; note = Description of Artificial Sequence: Synthetic oligonucleotide
atttttcctaggagtagaatt

SEQ ID NO: 21909 - RNA, 21 nt, synthetic construct
  source 1..21: mol_type = other RNA; note = Description of Artificial Sequence: Synthetic oligonucleotide
tttttcctaggagtagacatt

SEQ ID NO: 21910 - RNA, 21 nt, synthetic construct
  source 1..21: mol_type = other RNA; note = Description of Artificial Sequence: Synthetic oligonucleotide
ttttcctaggagtagacaatt

SEQ ID NO: 21911 - RNA, 21 nt, synthetic construct
  source 1..21: mol_type = other RNA; note = Description of Artificial Sequence: Synthetic oligonucleotide
tttcctaggagtagacatatt

SEQ ID NO: 21912 - RNA, 21 nt, synthetic construct
  source 1..21: mol_type = other RNA; note = Description of Artificial Sequence: Synthetic oligonucleotide
ttcctaggagtagacatgatt

SEQ ID NO: 21913 - RNA, 21 nt, synthetic construct
  source 1..21: mol_type = other RNA; note = Description of Artificial Sequence: Synthetic oligonucleotide
tcctaggagtagacatgtatt

SEQ ID NO: 21914 - RNA, 21 nt, synthetic construct
  source 1..21: mol_type = other RNA; note = Description of Artificial Sequence: Synthetic oligonucleotide
cctaggagtagacatgttatt

SEQ ID NO: 21915 - RNA, 21 nt, synthetic construct
  source 1..21: mol_type = other RNA; note = Description of Artificial Sequence: Synthetic oligonucleotide
ctaggagtagacatgttcatt

SEQ ID NO: 21916 - RNA, 21 nt, synthetic construct
  source 1..21: mol_type = other RNA; note = Description of Artificial Sequence: Synthetic oligonucleotide
taggagtagacatgttccatt

SEQ ID NO: 21917 - RNA, 21 nt, synthetic construct
  source 1..21: mol_type = other RNA; note = Description of Artificial Sequence: Synthetic oligonucleotide
aggagtagacatgttcctatt

SEQ ID NO: 21918 - RNA, 21 nt, synthetic construct
  source 1..21: mol_type = other RNA; note = Description of Artificial Sequence: Synthetic oligonucleotide
ggagtagacatgttcctcatt

SEQ ID NO: 21919 - RNA, 21 nt, synthetic construct
  source 1..21: mol_type = other RNA; note = Description of Artificial Sequence: Synthetic oligonucleotide
gagtagacatgttcctctatt

SEQ ID NO: 21920 - RNA, 21 nt, synthetic construct
  source 1..21: mol_type = other RNA; note = Description of Artificial Sequence: Synthetic oligonucleotide
agtagacatgttcctctaatt

SEQ ID NO: 21921 - RNA, 21 nt, synthetic construct
  source 1..21: mol_type = other RNA; note = Description of Artificial Sequence: Synthetic oligonucleotide
gtagacatgttcctctaaatt

SEQ ID NO: 21922 - RNA, 21 nt, synthetic construct
  source 1..21: mol_type = other RNA; note = Description of Artificial Sequence: Synthetic oligonucleotide
tagacatgttcctctaatatt

SEQ ID NO: 21923 - RNA, 21 nt, synthetic construct
  source 1..21: mol_type = other RNA; note = Description of Artificial Sequence: Synthetic oligonucleotide
agacatgttcctctaattatt

SEQ ID NO: 21924 - RNA, 21 nt, synthetic construct
  source 1..21: mol_type = other RNA; note = Description of Artificial Sequence: Synthetic oligonucleotide
gacatgttcctctaattaatt

SEQ ID NO: 21925 - RNA, 21 nt, synthetic construct
  source 1..21: mol_type = other RNA; note = Description of Artificial Sequence: Synthetic oligonucleotide
acatgttcctctaattacatt

SEQ ID NO: 21926 - RNA, 21 nt, synthetic construct
  source 1..21: mol_type = other RNA; note = Description of Artificial Sequence: Synthetic oligonucleotide
catgttcctctaattactatt

SEQ ID NO: 21927 - RNA, 21 nt, synthetic construct
  source 1..21: mol_type = other RNA; note = Description of Artificial Sequence: Synthetic oligonucleotide
atgttcctctaattactcatt

SEQ ID NO: 21928 - RNA, 21 nt, synthetic construct
  source 1..21: mol_type = other RNA; note = Description of Artificial Sequence: Synthetic oligonucleotide
tgttcctctaattactccatt

SEQ ID NO: 21929 - RNA, 21 nt, synthetic construct
  source 1..21: mol_type = other RNA; note = Description of Artificial Sequence: Synthetic oligonucleotide
gttcctctaattactcccatt

SEQ ID NO: 21930 - RNA, 21 nt, synthetic construct
  source 1..21: mol_type = other RNA; note = Description of Artificial Sequence: Synthetic oligonucleotide
ttcctctaattactccctatt

SEQ ID NO: 21931 - RNA, 21 nt, synthetic construct
  source 1..21: mol_type = other RNA; note = Description of Artificial Sequence: Synthetic oligonucleotide
tcctctaattactccctgatt

SEQ ID NO: 21932 - RNA, 21 nt, synthetic construct
  source 1..21: mol_type = other RNA; note = Description of Artificial Sequence: Synthetic oligonucleotide
cctctaattactccctgaatt

SEQ ID NO: 21933 - RNA, 21 nt, synthetic construct
  source 1..21: mol_type = other RNA; note = Description of Artificial Sequence: Synthetic oligonucleotide
ctctaattactccctgagatt

SEQ ID NO: 21934 - RNA, 21 nt, synthetic construct
  source 1..21: mol_type = other RNA; note = Description of Artificial Sequence: Synthetic oligonucleotide
tctaattactccctgaggatt

SEQ ID NO: 21935 - RNA, 21 nt, synthetic construct
  source 1..21: mol_type = other RNA; note = Description of Artificial Sequence: Synthetic oligonucleotide
ctaattactccctgagggatt

SEQ ID NO: 21936 - RNA, 21 nt, synthetic construct
  source 1..21: mol_type = other RNA; note = Description of Artificial Sequence: Synthetic oligonucleotide
taattactccctgagggtatt

SEQ ID NO: 21937 - RNA, 21 nt, synthetic construct
  source 1..21: mol_type = other RNA; note = Description of Artificial Sequence: Synthetic oligonucleotide
aattactccctgagggttatt

SEQ ID NO: 21938 - RNA, 21 nt, synthetic construct
  source 1..21: mol_type = other RNA; note = Description of Artificial Sequence: Synthetic oligonucleotide
attactccctgagggttaatt

SEQ ID NO: 21939 - RNA, 21 nt, synthetic construct
  source 1..21: mol_type = other RNA; note = Description of Artificial Sequence: Synthetic oligonucleotide
ttactccctgagggttagatt

SEQ ID NO: 21940 - RNA, 21 nt, synthetic construct
  source 1..21: mol_type = other RNA; note = Description of Artificial Sequence: Synthetic oligonucleotide
tactccctgagggttagtatt

SEQ ID NO: 21941 - RNA, 21 nt, synthetic construct
  source 1..21: mol_type = other RNA; note = Description of Artificial Sequence: Synthetic oligonucleotide
actccctgagggttagttatt

SEQ ID NO: 21942 - RNA, 21 nt, synthetic construct
  source 1..21: mol_type = other RNA; note = Description of Artificial Sequence: Synthetic oligonucleotide
ctccctgagggttagttgatt

SEQ ID NO: 21943 - RNA, 21 nt, synthetic construct
  source 1..21: mol_type = other RNA; note = Description of Artificial Sequence: Synthetic oligonucleotide
tccctgagggttagttggatt

SEQ ID NO: 21944 - RNA, 21 nt, synthetic construct
  source 1..21: mol_type = other RNA; note = Description of Artificial Sequence: Synthetic oligonucleotide
ccctgagggttagttgggatt

SEQ ID NO: 21945 - RNA, 21 nt, synthetic construct
  source 1..21: mol_type = other RNA; note = Description of Artificial Sequence: Synthetic oligonucleotide
cctgagggttagttggggatt

SEQ ID NO: 21946 - RNA, 21 nt, synthetic construct
  source 1..21: mol_type = other RNA; note = Description of Artificial Sequence: Synthetic oligonucleotide
ctgagggttagttggggcatt

SEQ ID NO: 21947 - RNA, 21 nt, synthetic construct
  source 1..21: mol_type = other RNA; note = Description of Artificial Sequence: Synthetic oligonucleotide
tgagggttagttggggctatt

SEQ ID NO: 21948 - RNA, 21 nt, synthetic construct
  source 1..21: mol_type = other RNA; note = Description of Artificial Sequence: Synthetic oligonucleotide
gagggttagttggggctaatt

SEQ ID NO: 21949 - RNA, 21 nt, synthetic construct
  source 1..21: mol_type = other RNA; note = Description of Artificial Sequence: Synthetic oligonucleotide
agggttagttggggctaaatt

SEQ ID NO: 21950 - RNA, 21 nt, synthetic construct
  source 1..21: mol_type = other RNA; note = Description of Artificial Sequence: Synthetic oligonucleotide
gggttagttggggctaaaatt

SEQ ID NO: 21951 - RNA, 21 nt, synthetic construct
  source 1..21: mol_type = other RNA; note = Description of Artificial Sequence: Synthetic oligonucleotide
ggttagttggggctaaacatt

SEQ ID NO: 21952 - RNA, 21 nt, synthetic construct
  source 1..21: mol_type = other RNA; note = Description of Artificial Sequence: Synthetic oligonucleotide
gttagttggggctaaaccatt

SEQ ID NO: 21953 - RNA, 21 nt, synthetic construct
  source 1..21: mol_type = other RNA; note = Description of Artificial Sequence: Synthetic oligonucleotide
ttagttggggctaaaccaatt

SEQ ID NO: 21954 - RNA, 21 nt, synthetic construct
  source 1..21: mol_type = other RNA; note = Description of Artificial Sequence: Synthetic oligonucleotide
tagttggggctaaaccatatt

SEQ ID NO: 21955 - RNA, 21 nt, synthetic construct
  source 1..21: mol_type = other RNA; note = Description of Artificial Sequence: Synthetic oligonucleotide
agttggggctaaaccatgatt

SEQ ID NO: 21956 - RNA, 21 nt, synthetic construct
  source 1..21: mol_type = other RNA; note = Description of Artificial Sequence: Synthetic oligonucleotide
gttggggctaaaccatgaatt

SEQ ID NO: 21957 - RNA, 21 nt, synthetic construct
  source 1..21: mol_type = other RNA; note = Description of Artificial Sequence: Synthetic oligonucleotide
ttggggctaaaccatgacatt

SEQ ID NO: 21958 - RNA, 21 nt, synthetic construct
  source 1..21: mol_type = other RNA; note = Description of Artificial Sequence: Synthetic oligonucleotide
tggggctaaaccatgacaatt

SEQ ID NO: 21959 - RNA, 21 nt, synthetic construct
  source 1..21: mol_type = other RNA; note = Description of Artificial Sequence: Synthetic oligonucleotide
ggggctaaaccatgacagatt

SEQ ID NO: 21960 - RNA, 21 nt, synthetic construct
  source 1..21: mol_type = other RNA; note = Description of Artificial Sequence: Synthetic oligonucleotide
gggctaaaccatgacagaatt

SEQ ID NO: 21961 - RNA, 21 nt, synthetic construct
  source 1..21: mol_type = other RNA; note = Description of Artificial Sequence: Synthetic oligonucleotide
ggctaaaccatgacagaaatt

SEQ ID NO: 21962 - RNA, 21 nt, synthetic construct
  source 1..21: mol_type = other RNA; note = Description of Artificial Sequence: Synthetic oligonucleotide
gctaaaccatgacagaagatt

SEQ ID NO: 21963 - RNA, 21 nt, synthetic construct
  source 1..21: mol_type = other RNA; note = Description of Artificial Sequence: Synthetic oligonucleotide
ctaaaccatgacagaagtatt

SEQ ID NO: 21964 - RNA, 21 nt, synthetic construct
  source 1..21: mol_type = other RNA; note = Description of Artificial Sequence: Synthetic oligonucleotide
taaaccatgacagaagtgatt

SEQ ID NO: 21965 - RNA, 21 nt, synthetic construct
  source 1..21: mol_type = other RNA; note = Description of Artificial Sequence: Synthetic oligonucleotide
aaaccatgacagaagtggatt

SEQ ID NO: 21966 - RNA, 21 nt, synthetic construct
  source 1..21: mol_type = other RNA; note = Description of Artificial Sequence: Synthetic oligonucleotide
aaccatgacagaagtgggatt

SEQ ID NO: 21967 - RNA, 21 nt, synthetic construct
  source 1..21: mol_type = other RNA; note = Description of Artificial Sequence: Synthetic oligonucleotide
accatgacagaagtggggatt

SEQ ID NO: 21968 - RNA, 21 nt, synthetic construct
  source 1..21: mol_type = other RNA; note = Description of Artificial Sequence: Synthetic oligonucleotide
ccatgacagaagtggggaatt

SEQ ID NO: 21969 - RNA, 21 nt, synthetic construct
  source 1..21: mol_type = other RNA; note = Description of Artificial Sequence: Synthetic oligonucleotide
catgacagaagtggggaaatt

SEQ ID NO: 21970 - RNA, 21 nt, synthetic construct
  source 1..21: mol_type = other RNA; note = Description of Artificial Sequence: Synthetic oligonucleotide
atgacagaagtggggaagatt

SEQ ID NO: 21971 - RNA, 21 nt, synthetic construct
  source 1..21: mol_type = other RNA; note = Description of Artificial Sequence: Synthetic oligonucleotide
tgacagaagtggggaagtatt

SEQ ID NO: 21972 - RNA, 21 nt, synthetic construct
  source 1..21: mol_type = other RNA; note = Description of Artificial Sequence: Synthetic oligonucleotide
gacagaagtggggaagttatt

SEQ ID NO: 21973 - RNA, 21 nt, synthetic construct
  source 1..21: mol_type = other RNA; note = Description of Artificial Sequence: Synthetic oligonucleotide
acagaagtggggaagttcatt

SEQ ID NO: 21974 - RNA, 21 nt, synthetic construct
  source 1..21: mol_type = other RNA; note = Description of Artificial Sequence: Synthetic oligonucleotide
cagaagtggggaagttcaatt

SEQ ID NO: 21975 - RNA, 21 nt, synthetic construct
  source 1..21: mol_type = other RNA; note = Description of Artificial Sequence: Synthetic oligonucleotide
agaagtggggaagttcaaatt

SEQ ID NO: 21976 - RNA, 21 nt, synthetic construct
  source 1..21: mol_type = other RNA; note = Description of Artificial Sequence: Synthetic oligonucleotide
gaagtggggaagttcaatatt

SEQ ID NO: 21977 - RNA, 21 nt, synthetic construct
  source 1..21: mol_type = other RNA; note = Description of Artificial Sequence: Synthetic oligonucleotide
aagtggggaagttcaatgatt

SEQ ID NO: 21978 - RNA, 21 nt, synthetic construct
  source 1..21: mol_type = other RNA; note = Description of Artificial Sequence: Synthetic oligonucleotide
agtggggaagttcaatgtatt

SEQ ID NO: 21979 - RNA, 21 nt, synthetic construct
  source 1..21: mol_type = other RNA; note = Description of Artificial Sequence: Synthetic oligonucleotide
gtggggaagttcaatgtcatt

SEQ ID NO: 21980 - RNA, 21 nt, synthetic construct
  source 1..21: mol_type = other RNA; note = Description of Artificial Sequence: Synthetic oligonucleotide
tggggaagttcaatgtccatt

SEQ ID NO: 21981 - RNA, 21 nt, synthetic construct
  source 1..21: mol_type = other RNA; note = Description of Artificial Sequence: Synthetic oligonucleotide
ggggaagttcaatgtcctatt

SEQ ID NO: 21982 - RNA, 21 nt, synthetic construct
  source 1..21: mol_type = other RNA; note = Description of Artificial Sequence: Synthetic oligonucleotide
gggaagttcaatgtccttatt

SEQ ID NO: 21983 - RNA, 21 nt, synthetic construct
  source 1..21: mol_type = other RNA; note = Description of Artificial Sequence: Synthetic oligonucleotide
ggaagttcaatgtccttaatt

SEQ ID NO: 21984 - RNA, 21 nt, synthetic construct
  source 1..21: mol_type = other RNA; note = Description of Artificial Sequence: Synthetic oligonucleotide
gaagttcaatgtccttaaatt

SEQ ID NO: 21985 - RNA, 21 nt, synthetic construct
  source 1..21: mol_type = other RNA; note = Description of Artificial Sequence: Synthetic oligonucleotide
aagttcaatgtccttaaaatt

SEQ ID NO: 21986 - RNA, 21 nt, synthetic construct
  source 1..21: mol_type = other RNA; note = Description of Artificial Sequence: Synthetic oligonucleotide
agttcaatgtccttaaatatt

SEQ ID NO: 21987 - RNA, 21 nt, synthetic construct
  source 1..21: mol_type = other RNA; note = Description of Artificial Sequence: Synthetic oligonucleotide
gttcaatgtccttaaatcatt

SEQ ID NO: 21988 - RNA, 21 nt, synthetic construct
  source 1..21: mol_type = other RNA; note = Description of Artificial Sequence: Synthetic oligonucleotide
ttcaatgtccttaaatccatt

SEQ ID NO: 21989 - RNA, 21 nt, synthetic construct
  source 1..21: mol_type = other RNA; note = Description of Artificial Sequence: Synthetic oligonucleotide
tcaatgtccttaaatccaatt

SEQ ID NO: 21990 - RNA, 21 nt, synthetic construct
  source 1..21: mol_type = other RNA; note = Description of Artificial Sequence: Synthetic oligonucleotide
caatgtccttaaatccatatt

SEQ ID NO: 21991 - RNA, 21 nt, synthetic construct
  source 1..21: mol_type = other RNA; note = Description of Artificial Sequence: Synthetic oligonucleotide
aatgtccttaaatccatcatt

SEQ ID NO: 21992 - RNA, 21 nt, synthetic construct
  source 1..21: mol_type = other RNA; note = Description of Artificial Sequence: Synthetic oligonucleotide
atgtccttaaatccatctatt

SEQ ID NO: 21993 - RNA, 21 nt, synthetic construct
  source 1..21: mol_type = other RNA; note = Description of Artificial Sequence: Synthetic oligonucleotide
tgtccttaaatccatcttatt

SEQ ID NO: 21994 - RNA, 21 nt, synthetic construct
  source 1..21: mol_type = other RNA; note = Description of Artificial Sequence: Synthetic oligonucleotide
gtccttaaatccatcttaatt

SEQ ID NO: 21995 - RNA, 21 nt, synthetic construct
  source 1..21: mol_type = other RNA; note = Description of Artificial Sequence: Synthetic oligonucleotide
tccttaaatccatcttacatt

SEQ ID NO: 21996 - RNA, 21 nt, synthetic construct
  source 1..21: mol_type = other RNA; note = Description of Artificial Sequence: Synthetic oligonucleotide
ccttaaatccatcttactatt

SEQ ID NO: 21997 - RNA, 21 nt, synthetic construct
  source 1..21: mol_type = other RNA; note = Description of Artificial Sequence: Synthetic oligonucleotide
cttaaatccatcttacttatt

SEQ ID NO: 21998 - RNA, 21 nt, synthetic construct
  source 1..21: mol_type = other RNA; note = Description of Artificial Sequence: Synthetic oligonucleotide
ttaaatccatcttacttgatt

SEQ ID NO: 21999 - RNA, 21 nt, synthetic construct
  source 1..21: mol_type = other RNA; note = Description of Artificial Sequence: Synthetic oligonucleotide
taaatccatcttacttgcatt

SEQ ID NO: 22000 - RNA, 21 nt, synthetic construct
  source 1..21: mol_type = other RNA; note = Description of Artificial Sequence: Synthetic oligonucleotide
aaatccatcttacttgccatt

SEQ ID NO: 22001 - RNA, 21 nt, synthetic construct
  source 1..21: mol_type = other RNA; note = Description of Artificial Sequence: Synthetic oligonucleotide
aatccatcttacttgccaatt

SEQ ID NO: 22002 - RNA, 21 nt, synthetic construct
  source 1..21: mol_type = other RNA; note = Description of Artificial Sequence: Synthetic oligonucleotide
atccatcttacttgccaaatt

SEQ ID NO: 22003 - RNA, 21 nt, synthetic construct
  source 1..21: mol_type = other RNA; note = Description of Artificial Sequence: Synthetic oligonucleotide
tccatcttacttgccaacatt

SEQ ID NO: 22004 - RNA, 21 nt, synthetic construct
  source 1..21: mol_type = other RNA; note = Description of Artificial Sequence: Synthetic oligonucleotide
ccatcttacttgccaacaatt

SEQ ID NO: 22005 - RNA, 21 nt, synthetic construct
  source 1..21: mol_type = other RNA; note = Description of Artificial Sequence: Synthetic oligonucleotide
catcttacttgccaacagatt

SEQ ID NO: 22006 - RNA, 21 nt, synthetic construct
  source 1..21: mol_type = other RNA; note = Description of Artificial Sequence: Synthetic oligonucleotide
atcttacttgccaacaggatt

SEQ ID NO: 22007 - RNA, 21 nt, synthetic construct
  source 1..21: mol_type = other RNA; note = Description of Artificial Sequence: Synthetic oligonucleotide
tcttacttgccaacaggtatt

SEQ ID NO: 22008 - RNA, 21 nt, synthetic construct
  source 1..21: mol_type = other RNA; note = Description of Artificial Sequence: Synthetic oligonucleotide
cttacttgccaacaggtaatt

SEQ ID NO: 22009 - RNA, 21 nt, synthetic construct
  source 1..21: mol_type = other RNA; note = Description of Artificial Sequence: Synthetic oligonucleotide
ttacttgccaacaggtaaatt

SEQ ID NO: 22010 - RNA, 21 nt, synthetic construct
  source 1..21: mol_type = other RNA; note = Description of Artificial Sequence: Synthetic oligonucleotide
tacttgccaacaggtaagatt

SEQ ID NO: 22011 - RNA, 21 nt, synthetic construct
  source 1..21: mol_type = other RNA; note = Description of Artificial Sequence: Synthetic oligonucleotide
acttgccaacaggtaagaatt

SEQ ID NO: 22012 - RNA, 21 nt, synthetic construct
  source 1..21: mol_type = other RNA; note = Description of Artificial Sequence: Synthetic oligonucleotide
cttgccaacaggtaagagatt

SEQ ID NO: 22013 - RNA, 21 nt, synthetic construct
  source 1..21: mol_type = other RNA; note = Description of Artificial Sequence: Synthetic oligonucleotide
ttgccaacaggtaagaggatt

SEQ ID NO: 22014 - RNA, 21 nt, synthetic construct
  source 1..21: mol_type = other RNA; note = Description of Artificial Sequence: Synthetic oligonucleotide
tgccaacaggtaagaggaatt

SEQ ID NO: 22015 - RNA, 21 nt, synthetic construct
  source 1..21: mol_type = other RNA; note = Description of Artificial Sequence: Synthetic oligonucleotide
gccaacaggtaagaggaaatt

SEQ ID NO: 22016 - RNA, 21 nt, synthetic construct
  source 1..21: mol_type = other RNA; note = Description of Artificial Sequence: Synthetic oligonucleotide
ccaacaggtaagaggaagatt

SEQ ID NO: 22017 - RNA, 21 nt, synthetic construct
  source 1..21: mol_type = other RNA; note = Description of Artificial Sequence: Synthetic oligonucleotide
caacaggtaagaggaagcatt

SEQ ID NO: 22018 - RNA, 21 nt, synthetic construct
  source 1..21: mol_type = other RNA; note = Description of Artificial Sequence: Synthetic oligonucleotide
aacaggtaagaggaagctatt

SEQ ID NO: 22019 - RNA, 21 nt, synthetic construct
  source 1..21: mol_type = other RNA; note = Description of Artificial Sequence: Synthetic oligonucleotide
acaggtaagaggaagcttatt

SEQ ID NO: 22020 - RNA, 21 nt, synthetic construct
  source 1..21: mol_type = other RNA; note = Description of Artificial Sequence: Synthetic oligonucleotide
caggtaagaggaagcttaatt

SEQ ID NO: 22021 - RNA, 21 nt, synthetic construct
  source 1..21: mol_type = other RNA; note = Description of Artificial Sequence: Synthetic oligonucleotide
aggtaagaggaagcttacatt

SEQ ID NO: 22022 - RNA, 21 nt, synthetic construct
  source 1..21: mol_type = other RNA; note = Description of Artificial Sequence: Synthetic oligonucleotide
ggtaagaggaagcttacaatt

SEQ ID NO: 22023 - RNA, 21 nt, synthetic construct
  source 1..21: mol_type = other RNA; note = Description of Artificial Sequence: Synthetic oligonucleotide
gtaagaggaagcttacatatt

SEQ ID NO: 22024 - RNA, 21 nt, synthetic construct
  source 1..21: mol_type = other RNA; note = Description of Artificial Sequence: Synthetic oligonucleotide
taagaggaagcttacattatt

SEQ ID NO: 22025 - RNA, 21 nt, synthetic construct
  source 1..21: mol_type = other RNA; note = Description of Artificial Sequence: Synthetic oligonucleotide
aagaggaagcttacattaatt

SEQ ID NO: 22026 - RNA, 21 nt, synthetic construct
  source 1..21: mol_type = other RNA; note = Description of Artificial Sequence: Synthetic oligonucleotide
agaggaagcttacattacatt

SEQ ID NO: 22027 - RNA, 21 nt, synthetic construct
  source 1..21: mol_type = other RNA; note = Description of Artificial Sequence: Synthetic oligonucleotide
gaggaagcttacattacaatt

SEQ ID NO: 22028 - RNA, 21 nt, synthetic construct
  source 1..21: mol_type = other RNA; note = Description of Artificial Sequence: Synthetic oligonucleotide
aggaagcttacattacatatt

SEQ ID NO: 22029 - RNA, 21 nt, synthetic construct
  source 1..21: mol_type = other RNA; note = Description of Artificial Sequence: Synthetic oligonucleotide
ggaagcttacattacatgatt

SEQ ID NO: 22030 - RNA, 21 nt, synthetic construct
  source 1..21: mol_type = other RNA; note = Description of Artificial Sequence: Synthetic oligonucleotide
gaagcttacattacatgtatt

SEQ ID NO: 22031 - RNA, 21 nt, synthetic construct
  source 1..21: mol_type = other RNA; note = Description of Artificial Sequence: Synthetic oligonucleotide
aagcttacattacatgtcatt

SEQ ID NO: 22032 - RNA, 21 nt, synthetic construct
  source 1..21: mol_type = other RNA; note = Description of Artificial Sequence: Synthetic oligonucleotide
agcttacattacatgtccatt

SEQ ID NO: 22033 - RNA, 21 nt, synthetic construct
  source 1..21: mol_type = other RNA; note = Description of Artificial Sequence: Synthetic oligonucleotide
gcttacattacatgtccaatt

SEQ ID NO: 22034 - RNA, 21 nt, synthetic construct
  source 1..21: mol_type = other RNA; note = Description of Artificial Sequence: Synthetic oligonucleotide
cttacattacatgtccagatt

SEQ ID NO: 22035 - RNA, 21 nt, synthetic construct
  source 1..21: mol_type = other RNA; note = Description of Artificial Sequence: Synthetic oligonucleotide
ttacattacatgtccagtatt

SEQ ID NO: 22036 - RNA, 21 nt, synthetic construct
  source 1..21: mol_type = other RNA; note = Description of Artificial Sequence: Synthetic oligonucleotide
tacattacatgtccagtcatt

SEQ ID NO: 22037 - RNA, 21 nt, synthetic construct
  source 1..21: mol_type = other RNA; note = Description of Artificial Sequence: Synthetic oligonucleotide
acattacatgtccagtccatt

SEQ ID NO: 22038 - RNA, 21 nt, synthetic construct
  source 1..21: mol_type = other RNA; note = Description of Artificial Sequence: Synthetic oligonucleotide
cattacatgtccagtccaatt

SEQ ID NO: 22039 - RNA, 21 nt, synthetic construct
  source 1..21: mol_type = other RNA; note = Description of Artificial Sequence: Synthetic oligonucleotide
attacatgtccagtccacatt

SEQ ID NO: 22040 - RNA, 21 nt, synthetic construct
  source 1..21: mol_type = other RNA; note = Description of Artificial Sequence: Synthetic oligonucleotide
ttacatgtccagtccacaatt

SEQ ID NO: 22041 - RNA, 21 nt, synthetic construct
  source 1..21: mol_type = other RNA; note = Description of Artificial Sequence: Synthetic oligonucleotide
tacatgtccagtccacatatt

SEQ ID NO: 22042 - RNA, 21 nt, synthetic construct
  source 1..21: mol_type = other RNA; note = Description of Artificial Sequence: Synthetic oligonucleotide
acatgtccagtccacattatt

SEQ ID NO: 22043 - RNA, 21 nt, synthetic construct
  source 1..21: mol_type = other RNA; note = Description of Artificial Sequence: Synthetic oligonucleotide
catgtccagtccacatttatt

SEQ ID NO: 22044 - RNA, 21 nt, synthetic construct
  source 1..21: mol_type = other RNA; note = Description of Artificial Sequence: Synthetic oligonucleotide
atgtccagtccacatttaatt

SEQ ID NO: 22045 - RNA, 21 nt, synthetic construct
  source 1..21: mol_type = other RNA; note = Description of Artificial Sequence: Synthetic oligonucleotide
tgtccagtccacatttaaatt

SEQ ID NO: 22046 - RNA, 21 nt, synthetic construct
  source 1..21: mol_type = other RNA; note = Description of Artificial Sequence: Synthetic oligonucleotide
gtccagtccacatttaaaatt

SEQ ID NO: 22047 - RNA, 21 nt, synthetic construct
  source 1..21: mol_type = other RNA; note = Description of Artificial Sequence: Synthetic oligonucleotide
tccagtccacatttaaagatt

SEQ ID NO: 22048 - RNA, 21 nt, synthetic construct
  source 1..21: mol_type = other RNA; note = Description of Artificial Sequence: Synthetic oligonucleotide
ccagtccacatttaaagaatt

SEQ ID NO: 22049 - RNA, 21 nt, synthetic construct
  source 1..21: mol_type = other RNA; note = Description of Artificial Sequence: Synthetic oligonucleotide
cagtccacatttaaagagatt

SEQ ID NO: 22050 - RNA, 21 nt, synthetic construct
  source 1..21: mol_type = other RNA; note = Description of Artificial Sequence: Synthetic oligonucleotide
agtccacatttaaagagcatt

SEQ ID NO: 22051 - RNA, 21 nt, synthetic construct
  source 1..21: mol_type = other RNA; note = Description of Artificial Sequence: Synthetic oligonucleotide
gtccacatttaaagagcaatt

SEQ ID NO: 22052 - RNA, 21 nt, synthetic construct
  source 1..21: mol_type = other RNA; note = Description of Artificial Sequence: Synthetic oligonucleotide
tccacatttaaagagcacatt

SEQ ID NO: 22053 - RNA, 21 nt, synthetic construct
  source 1..21: mol_type = other RNA; note = Description of Artificial Sequence: Synthetic oligonucleotide
ccacatttaaagagcactatt

SEQ ID NO: 22054 - RNA, 21 nt, synthetic construct
  source 1..21: mol_type = other RNA; note = Description of Artificial Sequence: Synthetic oligonucleotide
cacatttaaagagcacttatt

SEQ ID NO: 22055 - RNA, 21 nt, synthetic construct
  source 1..21: mol_type = other RNA; note = Description of Artificial Sequence: Synthetic oligonucleotide
acatttaaagagcacttaatt

SEQ ID NO: 22056 - RNA, 21 nt, synthetic construct
  source 1..21: mol_type = other RNA; note = Description of Artificial Sequence: Synthetic oligonucleotide
catttaaagagcacttacatt

SEQ ID NO: 22057 - RNA, 21 nt, synthetic construct
  source 1..21: mol_type = other RNA; note = Description of Artificial Sequence: Synthetic oligonucleotide
atttaaagagcacttactatt

SEQ ID NO: 22058 - RNA, 21 nt, synthetic construct
  source 1..21: mol_type = other RNA; note = Description of Artificial Sequence: Synthetic oligonucleotide
tttaaagagcacttactgatt

SEQ ID NO: 22059 - RNA, 21 nt, synthetic construct
  source 1..21: mol_type = other RNA; note = Description of Artificial Sequence: Synthetic oligonucleotide
ttaaagagcacttactgtatt

SEQ ID NO: 22060 - RNA, 21 nt, synthetic construct
  source 1..21: mol_type = other RNA; note = Description of Artificial Sequence: Synthetic oligonucleotide
taaagagcacttactgtgatt

SEQ ID NO: 22061 - RNA, 21 nt, synthetic construct
  source 1..21: mol_type = other RNA; note = Description of Artificial Sequence: Synthetic oligonucleotide
aaagagcacttactgtggatt

SEQ ID NO: 22062 - RNA, 21 nt, synthetic construct
  source 1..21: mol_type = other RNA; note = Description of Artificial Sequence: Synthetic oligonucleotide
aagagcacttactgtggaatt

SEQ ID NO: 22063 - RNA, 21 nt, synthetic construct
  source 1..21: mol_type = other RNA; note = Description of Artificial Sequence: Synthetic oligonucleotide
agagcacttactgtggaaatt

SEQ ID NO: 22064 - RNA, 21 nt, synthetic construct
  source 1..21: mol_type = other RNA; note = Description of Artificial Sequence: Synthetic oligonucleotide
gagcacttactgtggaacatt

SEQ ID NO: 22065 - RNA, 21 nt, synthetic construct
  source 1..21: mol_type = other RNA; note = Description of Artificial Sequence: Synthetic oligonucleotide
agcacttactgtggaacaatt

SEQ ID NO: 22066 - RNA, 21 nt, synthetic construct
  source 1..21: mol_type = other RNA; note = Description of Artificial Sequence: Synthetic oligonucleotide
gcacttactgtggaacaaatt

SEQ ID NO: 22067 - RNA, 21 nt, synthetic construct
  source 1..21: mol_type = other RNA; note = Description of Artificial Sequence: Synthetic oligonucleotide
cacttactgtggaacaagatt

SEQ ID NO: 22068 - RNA, 21 nt, synthetic construct
  source 1..21: mol_type = other RNA; note = Description of Artificial Sequence: Synthetic oligonucleotide
acttactgtggaacaagcatt

SEQ ID NO: 22069 - RNA, 21 nt, synthetic construct
  source 1..21: mol_type = other RNA; note = Description of Artificial Sequence: Synthetic oligonucleotide
cttactgtggaacaagccatt

SEQ ID NO: 22070 - RNA, 21 nt, synthetic construct
  source 1..21: mol_type = other RNA; note = Description of Artificial Sequence: Synthetic oligonucleotide
ttactgtggaacaagcctatt

SEQ ID NO: 22071 - RNA, 21 nt, synthetic construct
  source 1..21: mol_type = other RNA; note = Description of Artificial Sequence: Synthetic oligonucleotide
tactgtggaacaagccttatt

SEQ ID NO: 22072 - RNA, 21 nt, synthetic construct
  source 1..21: mol_type = other RNA; note = Description of Artificial Sequence: Synthetic oligonucleotide
actgtggaacaagccttcatt

SEQ ID NO: 22073 - RNA, 21 nt, synthetic construct
  source 1..21: mol_type = other RNA; note = Description of Artificial Sequence: Synthetic oligonucleotide
ctgtggaacaagccttcaatt

SEQ ID NO: 22074 - RNA, 21 nt, synthetic construct
  source 1..21: mol_type = other RNA; note = Description of Artificial Sequence: Synthetic oligonucleotide
tgtggaacaagccttcagatt

SEQ ID NO: 22075 - RNA, 21 nt, synthetic construct
  source 1..21: mol_type = other RNA; note = Description of Artificial Sequence: Synthetic oligonucleotide
gtggaacaagccttcagcatt

SEQ ID NO: 22076 - RNA, 21 nt, synthetic construct
  source 1..21: mol_type = other RNA; note = Description of Artificial Sequence: Synthetic oligonucleotide
tggaacaagccttcagccatt

SEQ ID NO: 22077 - RNA, 21 nt, synthetic construct
  source 1..21: mol_type = other RNA; note = Description of Artificial Sequence: Synthetic oligonucleotide
ggaacaagccttcagccaatt

SEQ ID NO: 22078 - RNA, 21 nt, synthetic construct
  source 1..21: mol_type = other RNA; note = Description of Artificial Sequence: Synthetic oligonucleotide
gaacaagccttcagccaaatt

SEQ ID NO: 22079 - RNA, 21 nt, synthetic construct
  source 1..21: mol_type = other RNA; note = Description of Artificial Sequence: Synthetic oligonucleotide
aacaagccttcagccaaaatt

SEQ ID NO: 22080 - RNA, 21 nt, synthetic construct
  source 1..21: mol_type = other RNA; note = Description of Artificial Sequence: Synthetic oligonucleotide
acaagccttcagccaaacatt

SEQ ID NO: 22081 - RNA, 21 nt, synthetic construct
  source 1..21: mol_type = other RNA; note = Description of Artificial Sequence: Synthetic oligonucleotide
caagccttcagccaaacaatt

SEQ ID NO: 22082 - RNA, 21 nt, synthetic construct
  source 1..21: mol_type = other RNA; note = Description of Artificial Sequence: Synthetic oligonucleotide
aagccttcagccaaacaaatt

SEQ ID NO: 22083 - RNA, 21 nt, synthetic construct
  source 1..21: mol_type = other RNA; note = Description of Artificial Sequence: Synthetic oligonucleotide
agccttcagccaaacaatatt

SEQ ID NO: 22084 - RNA, 21 nt, synthetic construct
  source 1..21: mol_type = other RNA; note = Description of Artificial Sequence: Synthetic oligonucleotide
gccttcagccaaacaatgatt

SEQ ID NO: 22085 - RNA, 21 nt, synthetic construct
  source 1..21: mol_type = other RNA; note = Description of Artificial Sequence: Synthetic oligonucleotide
ccttcagccaaacaatggatt

SEQ ID NO: 22086 - RNA, 21 nt, synthetic construct
  source 1..21: mol_type = other RNA; note = Description of Artificial Sequence: Synthetic oligonucleotide
cttcagccaaacaatgggatt

SEQ ID NO: 22087 - RNA, 21 nt, synthetic construct
  source 1..21: mol_type = other RNA; note = Description of Artificial Sequence: Synthetic oligonucleotide
ttcagccaaacaatggggatt

SEQ ID NO: 22088 - RNA, 21 nt, synthetic construct
  source 1..21: mol_type = other RNA; note = Description of Artificial Sequence: Synthetic oligonucleotide
tcagccaaacaatggggaatt

SEQ ID NO: 22089 - RNA, 21 nt, synthetic construct
  source 1..21: mol_type = other RNA; note = Description of Artificial Sequence: Synthetic oligonucleotide
cagccaaacaatggggatatt

SEQ ID NO: 22090 - RNA, 21 nt, synthetic construct
  source 1..21: mol_type = other RNA; note = Description of Artificial Sequence: Synthetic oligonucleotide
agccaaacaatggggataatt

SEQ ID NO: 22091 - RNA, 21 nt, synthetic construct
  source 1..21: mol_type = other RNA; note = Description of Artificial Sequence: Synthetic oligonucleotide
gccaaacaatggggatagatt

SEQ ID NO: 22092 - RNA, 21 nt, synthetic construct
  source 1..21: mol_type = other RNA; note = Description of Artificial Sequence: Synthetic oligonucleotide
ccaaacaatggggatagaatt

SEQ ID NO: 22093 - RNA, 21 nt, synthetic construct
  source 1..21: mol_type = other RNA; note = Description of Artificial Sequence: Synthetic oligonucleotide
caaacaatggggatagaaatt

SEQ ID NO: 22094 - RNA, 21 nt, synthetic construct
  source 1..21: mol_type = other RNA; note = Description of Artificial Sequence: Synthetic oligonucleotide
aaacaatggggatagaaaatt

SEQ ID NO: 22095 - RNA, 21 nt, synthetic construct
  source 1..21: mol_type = other RNA; note = Description of Artificial Sequence: Synthetic oligonucleotide
aacaatggggatagaaaaatt

SEQ ID NO: 22096 - RNA, 21 nt, synthetic construct
  source 1..21: mol_type = other RNA; note = Description of Artificial Sequence: Synthetic oligonucleotide
acaatggggatagaaaagatt

SEQ ID NO: 22097 - RNA, 21 nt, synthetic construct
  source 1..21: mol_type = other RNA; note = Description of Artificial Sequence: Synthetic oligonucleotide
caatggggatagaaaagtatt

SEQ ID NO: 22098 - RNA, 21 nt, synthetic construct
  source 1..21: mol_type = other RNA; note = Description of Artificial Sequence: Synthetic oligonucleotide
aatggggatagaaaagtaatt

SEQ ID NO: 22099 - RNA, 21 nt, synthetic construct
  source 1..21: mol_type = other RNA; note = Description of Artificial Sequence: Synthetic oligonucleotide
atggggatagaaaagtagatt

SEQ ID NO: 22100 - RNA, 21 nt, synthetic construct
  source 1..21: mol_type = other RNA; note = Description of Artificial Sequence: Synthetic oligonucleotide
tggggatagaaaagtaggatt

SEQ ID NO: 22101 - RNA, 21 nt, synthetic construct
  source 1..21: mol_type = other RNA; note = Description of Artificial Sequence: Synthetic oligonucleotide
ggggatagaaaagtaggtatt

SEQ ID NO: 22102 - RNA, 21 nt, synthetic construct
  source 1..21: mol_type = other RNA; note = Description of Artificial Sequence: Synthetic oligonucleotide
gggatagaaaagtaggtaatt

SEQ ID NO: 22103 - RNA, 21 nt, synthetic construct
  source 1..21: mol_type = other RNA; note = Description of Artificial Sequence: Synthetic oligonucleotide
ggatagaaaagtaggtaaatt

SEQ ID NO: 22104 - RNA, 21 nt, synthetic construct
  source 1..21: mol_type = other RNA; note = Description of Artificial Sequence: Synthetic oligonucleotide
gatagaaaagtaggtaagatt

SEQ ID NO: 22105 - RNA, 21 nt, synthetic construct
  source 1..21: mol_type = other RNA; note = Description of Artificial Sequence: Synthetic oligonucleotide
atagaaaagtaggtaagaatt

SEQ ID NO: 22106 - RNA, 21 nt, synthetic construct
  source 1..21: mol_type = other RNA; note = Description of Artificial Sequence: Synthetic oligonucleotide
tagaaaagtaggtaagacatt

SEQ ID NO: 22107 - RNA, 21 nt, synthetic construct
  source 1..21: mol_type = other RNA; note = Description of Artificial Sequence: Synthetic oligonucleotide
agaaaagtaggtaagactatt

SEQ ID NO: 22108 - RNA, 21 nt, synthetic construct
  source 1..21: mol_type = other RNA; note = Description of Artificial Sequence: Synthetic oligonucleotide
gaaaagtaggtaagactcatt

SEQ ID NO: 22109 - RNA, 21 nt, synthetic construct
  source 1..21: mol_type = other RNA; note = Description of Artificial Sequence: Synthetic oligonucleotide
aaaagtaggtaagactcaatt

SEQ ID NO: 22110 - RNA, 21 nt, synthetic construct
  source 1..21: mol_type = other RNA; note = Description of Artificial Sequence: Synthetic oligonucleotide
aaagtaggtaagactcagatt

SEQ ID NO: 22111 - RNA, 21 nt, synthetic construct
  source 1..21: mol_type = other RNA; note = Description of Artificial Sequence: Synthetic oligonucleotide
aagtaggtaagactcagcatt

SEQ ID NO: 22112 - RNA, 21 nt, synthetic construct
  source 1..21: mol_type = other RNA; note = Description of Artificial Sequence: Synthetic oligonucleotide
agtaggtaagactcagccatt

SEQ ID NO: 22113 - RNA, 21 nt, synthetic construct
  source 1..21: mol_type = other RNA; note = Description of Artificial Sequence: Synthetic oligonucleotide
gtaggtaagactcagcctatt

SEQ ID NO: 22114 - RNA, 21 nt, synthetic construct
  source 1..21: mol_type = other RNA; note = Description of Artificial Sequence: Synthetic oligonucleotide
taggtaagactcagccttatt

SEQ ID NO: 22115 - RNA, 21 nt, synthetic construct
  source 1..21: mol_type = other RNA; note = Description of Artificial Sequence: Synthetic oligonucleotide
aggtaagactcagcctttatt

SEQ ID NO: 22116 - RNA, 21 nt, synthetic construct
  source 1..21: mol_type = other RNA; note = Description of Artificial Sequence: Synthetic oligonucleotide
ggtaagactcagcctttgatt

SEQ ID NO: 22117 - RNA, 21 nt, synthetic construct
  source 1..21: mol_type = other RNA; note = Description of Artificial Sequence: Synthetic oligonucleotide
gtaagactcagcctttgtatt

SEQ ID NO: 22118 - RNA, 21 nt, synthetic construct
  source 1..21: mol_type = other RNA; note = Description of Artificial Sequence: Synthetic oligonucleotide
taagactcagcctttgtcatt

SEQ ID NO: 22119 - RNA, 21 nt, synthetic construct
  source 1..21: mol_type = other RNA; note = Description of Artificial Sequence: Synthetic oligonucleotide
aagactcagcctttgtccatt

SEQ ID NO: 22120 - RNA, 21 nt, synthetic construct
  source 1..21: mol_type = other RNA; note = Description of Artificial Sequence: Synthetic oligonucleotide
agactcagcctttgtccaatt

SEQ ID NO: 22121 - RNA, 21 nt, synthetic construct
  source 1..21: mol_type = other RNA; note = Description of Artificial Sequence: Synthetic oligonucleotide
gactcagcctttgtccagatt

SEQ ID NO: 22122 - RNA, 21 nt, synthetic construct
  source 1..21: mol_type = other RNA; note = Description of Artificial Sequence: Synthetic oligonucleotide
actcagcctttgtccagaatt

SEQ ID NO: 22123 - RNA, 21 nt, synthetic construct
  source 1..21: mol_type = other RNA; note = Description of Artificial Sequence: Synthetic oligonucleotide
ctcagcctttgtccagagatt

SEQ ID NO: 22124 - RNA, 21 nt, synthetic construct
  source 1..21: mol_type = other RNA; note = Description of Artificial Sequence: Synthetic oligonucleotide
tcagcctttgtccagagaatt

SEQ ID NO: 22125 - RNA, 21 nt, synthetic construct
  source 1..21: mol_type = other RNA; note = Description of Artificial Sequence: Synthetic oligonucleotide
cagcctttgtccagagaaatt

SEQ ID NO: 22126 - RNA, 21 nt, synthetic construct
  source 1..21: mol_type = other RNA; note = Description of Artificial Sequence: Synthetic oligonucleotide
agcctttgtccagagaagatt

SEQ ID NO: 22127 - RNA, 21 nt, synthetic construct
  source 1..21: mol_type = other RNA; note = Description of Artificial Sequence: Synthetic oligonucleotide
gcctttgtccagagaagcatt

SEQ ID NO: 22128 - RNA, 21 nt, synthetic construct
  source 1..21: mol_type = other RNA; note = Description of Artificial Sequence: Synthetic oligonucleotide
cctttgtccagagaagctatt

SEQ ID NO: 22129 - RNA, 21 nt, synthetic construct
  source 1..21: mol_type = other RNA; note = Description of Artificial Sequence: Synthetic oligonucleotide
ctttgtccagagaagctcatt

SEQ ID NO: 22130 - RNA, 21 nt, synthetic construct
  source 1..21: mol_type = other RNA; note = Description of Artificial Sequence: Synthetic oligonucleotide
tttgtccagagaagctcaatt

SEQ ID NO: 22131 - RNA, 21 nt, synthetic construct
  source 1..21: mol_type = other RNA; note = Description of Artificial Sequence: Synthetic oligonucleotide
ttgtccagagaagctcagatt

SEQ ID NO: 22132 - RNA, 21 nt, synthetic construct
  source 1..21: mol_type = other RNA; note = Description of Artificial Sequence: Synthetic oligonucleotide
tgtccagagaagctcaggatt

SEQ ID NO: 22133 - RNA, 21 nt, synthetic construct
  source 1..21: mol_type = other RNA; note = Description of Artificial Sequence: Synthetic oligonucleotide
gtccagagaagctcagggatt

SEQ ID NO: 22134 - RNA, 21 nt, synthetic construct
  source 1..21: mol_type = other RNA; note = Description of Artificial Sequence: Synthetic oligonucleotide
tccagagaagctcagggtatt

SEQ ID NO: 22135 - RNA, 21 nt, synthetic construct
  source 1..21: mol_type = other RNA; note = Description of Artificial Sequence: Synthetic oligonucleotide
ccagagaagctcagggtaatt

SEQ ID NO: 22136 - RNA, 21 nt, synthetic construct
  source 1..21: mol_type = other RNA; note = Description of Artificial Sequence: Synthetic oligonucleotide
cagagaagctcagggtatatt

SEQ ID NO: 22137 - RNA, 21 nt, synthetic construct
  source 1..21: mol_type = other RNA; note = Description of Artificial Sequence: Synthetic oligonucleotide
agagaagctcagggtataatt

SEQ ID NO: 22138 - RNA, 21 nt, synthetic construct
  source 1..21: mol_type = other RNA; note = Description of Artificial Sequence: Synthetic oligonucleotide
gagaagctcagggtatagatt

SEQ ID NO: 22139 - RNA, 21 nt, synthetic construct
  source 1..21: mol_type = other RNA; note = Description of Artificial Sequence: Synthetic oligonucleotide
agaagctcagggtatagcatt

SEQ ID NO: 22140 - RNA, 21 nt, synthetic construct
  source 1..21: mol_type = other RNA; note = Description of Artificial Sequence: Synthetic oligonucleotide
gaagctcagggtatagctatt

SEQ ID NO: 22141 - RNA, 21 nt, synthetic construct
  source 1..21: mol_type = other RNA; note = Description of Artificial Sequence: Synthetic oligonucleotide
aagctcagggtatagctgatt

SEQ ID NO: 22142 - RNA, 21 nt, synthetic construct
  source 1..21: mol_type = other RNA; note = Description of Artificial Sequence: Synthetic oligonucleotide
agctcagggtatagctgaatt

SEQ ID NO: 22143 - RNA, 21 nt, synthetic construct
  source 1..21: mol_type = other RNA; note = Description of Artificial Sequence: Synthetic oligonucleotide
gctcagggtatagctgaaatt

SEQ ID NO: 22144 - RNA, 21 nt, synthetic construct
  source 1..21: mol_type = other RNA; note = Description of Artificial Sequence: Synthetic oligonucleotide
ctcagggtatagctgaatatt

SEQ ID NO: 22145 - RNA, 21 nt, synthetic construct
  source 1..21: mol_type = other RNA; note = Description of Artificial Sequence: Synthetic oligonucleotide
tcagggtatagctgaataatt

SEQ ID NO: 22146 - RNA, 21 nt, synthetic construct
  source 1..21: mol_type = other RNA; note = Description of Artificial Sequence: Synthetic oligonucleotide
cagggtatagctgaatagatt

SEQ ID NO: 22147 - RNA, 21 nt, synthetic construct
  source 1..21: mol_type = other RNA; note = Description of Artificial Sequence: Synthetic oligonucleotide
agggtatagctgaataggatt

SEQ ID NO: 22148 - RNA, 21 nt, synthetic construct
  source 1..21: mol_type = other RNA; note = Description of Artificial Sequence: Synthetic oligonucleotide
gggtatagctgaataggcatt

SEQ ID NO: 22149 - RNA, 21 nt, synthetic construct
  source 1..21: mol_type = other RNA; note = Description of Artificial Sequence: Synthetic oligonucleotide
ggtatagctgaataggcaatt

SEQ ID NO: 22150 - RNA, 21 nt, synthetic construct
  source 1..21: mol_type = other RNA; note = Description of Artificial Sequence: Synthetic oligonucleotide
gtatagctgaataggcagatt

SEQ ID NO: 22151 - RNA, 21 nt, synthetic construct
  source 1..21: mol_type = other RNA; note = Description of Artificial Sequence: Synthetic oligonucleotide
tatagctgaataggcagtatt

SEQ ID NO: 22152 - RNA, 21 nt, synthetic construct
  source 1..21: mol_type = other RNA; note = Description of Artificial Sequence: Synthetic oligonucleotide
atagctgaataggcagttatt

SEQ ID NO: 22153 - RNA, 21 nt, synthetic construct
  source 1..21: mol_type = other RNA; note = Description of Artificial Sequence: Synthetic oligonucleotide
tagctgaataggcagtttatt

SEQ ID NO: 22154 - RNA, 21 nt, synthetic construct
  source 1..21: mol_type = other RNA; note = Description of Artificial Sequence: Synthetic oligonucleotide
agctgaataggcagtttcatt

SEQ ID NO: 22155 - RNA, 21 nt, synthetic construct
  source 1..21: mol_type = other RNA; note = Description of Artificial Sequence: Synthetic oligonucleotide
gctgaataggcagtttctatt

SEQ ID NO: 22156 - RNA, 21 nt, synthetic construct
  source 1..21: mol_type = other RNA; note = Description of Artificial Sequence: Synthetic oligonucleotide
ctgaataggcagtttcttatt

SEQ ID NO: 22157 - RNA, 21 nt, synthetic construct
  source 1..21: mol_type = other RNA; note = Description of Artificial Sequence: Synthetic oligonucleotide
tgaataggcagtttctttatt

SEQ ID NO: 22158 - RNA, 21 nt, synthetic construct
  source 1..21: mol_type = other RNA; note = Description of Artificial Sequence: Synthetic oligonucleotide
gaataggcagtttcttttatt

SEQ ID NO: 22159 - RNA, 21 nt, synthetic construct
  source 1..21: mol_type = other RNA; note = Description of Artificial Sequence: Synthetic oligonucleotide
aataggcagtttcttttgatt

SEQ ID NO: 22160 - RNA, 21 nt, synthetic construct
  source 1..21: mol_type = other RNA; note = Description of Artificial Sequence: Synthetic oligonucleotide
ataggcagtttcttttgtatt

SEQ ID NO: 22161 - RNA, 21 nt, synthetic construct
  source 1..21: mol_type = other RNA; note = Description of Artificial Sequence: Synthetic oligonucleotide
taggcagtttcttttgtcatt

SEQ ID NO: 22162 - RNA, 21 nt, synthetic construct
  source 1..21: mol_type = other RNA; note = Description of Artificial Sequence: Synthetic oligonucleotide
aggcagtttcttttgtccatt

SEQ ID NO: 22163 - RNA, 21 nt, synthetic construct
  source 1..21: mol_type = other RNA; note = Description of Artificial Sequence: Synthetic oligonucleotide
ggcagtttcttttgtcctatt

SEQ ID NO: 22164 - RNA, 21 nt, synthetic construct
  source 1..21: mol_type = other RNA; note = Description of Artificial Sequence: Synthetic oligonucleotide
gcagtttcttttgtcctgatt

SEQ ID NO: 22165 - RNA, 21 nt, synthetic construct
  source 1..21: mol_type = other RNA; note = Description of Artificial Sequence: Synthetic oligonucleotide
cagtttcttttgtcctgaatt

SEQ ID NO: 22166 - RNA, 21 nt, synthetic construct
  source 1..21: mol_type = other RNA; note = Description of Artificial Sequence: Synthetic oligonucleotide
agtttcttttgtcctgagatt

SEQ ID NO: 22167 - RNA, 21 nt, synthetic construct
  source 1..21: mol_type = other RNA; note = Description of Artificial Sequence: Synthetic oligonucleotide
gtttcttttgtcctgaggatt

SEQ ID NO: 22168 - RNA, 21 nt, synthetic construct
  source 1..21: mol_type = other RNA; note = Description of Artificial Sequence: Synthetic oligonucleotide
tttcttttgtcctgaggaatt

SEQ ID NO: 22169 - RNA, 21 nt, synthetic construct
  source 1..21: mol_type = other RNA; note = Description of Artificial Sequence: Synthetic oligonucleotide
ttcttttgtcctgaggaaatt

SEQ ID NO: 22170 - RNA, 21 nt, synthetic construct
  source 1..21: mol_type = other RNA; note = Description of Artificial Sequence: Synthetic oligonucleotide
tcttttgtcctgaggaaaatt

SEQ ID NO: 22171 - RNA, 21 nt, synthetic construct
  source 1..21: mol_type = other RNA; note = Description of Artificial Sequence: Synthetic oligonucleotide
cttttgtcctgaggaaaaatt

SEQ ID NO: 22172 - RNA, 21 nt, synthetic construct
  source 1..21: mol_type = other RNA; note = Description of Artificial Sequence: Synthetic oligonucleotide
ttttgtcctgaggaaaatatt

SEQ ID NO: 22173 - RNA, 21 nt, synthetic construct
  source 1..21: mol_type = other RNA; note = Description of Artificial Sequence: Synthetic oligonucleotide
tttgtcctgaggaaaatcatt

SEQ ID NO: 22174 - RNA, 21 nt, synthetic construct
  source 1..21: mol_type = other RNA; note = Description of Artificial Sequence: Synthetic oligonucleotide
ttgtcctgaggaaaatcaatt

SEQ ID NO: 22175 - RNA, 21 nt, synthetic construct
  source 1..21: mol_type = other RNA; note = Description of Artificial Sequence: Synthetic oligonucleotide
tgtcctgaggaaaatcagatt

SEQ ID NO: 22176 - RNA, 21 nt, synthetic construct
  source 1..21: mol_type = other RNA; note = Description of Artificial Sequence: Synthetic oligonucleotide
gtcctgaggaaaatcaggatt

SEQ ID NO: 22177 - RNA, 21 nt, synthetic construct
  source 1..21: mol_type = other RNA; note = Description of Artificial Sequence: Synthetic oligonucleotide
tcctgaggaaaatcaggaatt

SEQ ID NO: 22178 - RNA, 21 nt, synthetic construct
  source 1..21: mol_type = other RNA; note = Description of Artificial Sequence: Synthetic oligonucleotide
cctgaggaaaatcaggacatt

SEQ ID NO: 22179 - RNA, 21 nt, synthetic construct
  source 1..21: mol_type = other RNA; note = Description of Artificial Sequence: Synthetic oligonucleotide
ctgaggaaaatcaggacaatt

SEQ ID NO: 22180 - RNA, 21 nt, synthetic construct
  source 1..21: mol_type = other RNA; note = Description of Artificial Sequence: Synthetic oligonucleotide
tgaggaaaatcaggacatatt

SEQ ID NO: 22181 - RNA, 21 nt, synthetic construct
  source 1..21: mol_type = other RNA; note = Description of Artificial Sequence: Synthetic oligonucleotide
gaggaaaatcaggacatgatt

SEQ ID NO: 22182 - RNA, 21 nt, synthetic construct
  source 1..21: mol_type = other RNA; note = Description of Artificial Sequence: Synthetic oligonucleotide
aggaaaatcaggacatgcatt

SEQ ID NO: 22183 - RNA, 21 nt, synthetic construct
  source 1..21: mol_type = other RNA; note = Description of Artificial Sequence: Synthetic oligonucleotide
ggaaaatcaggacatgccatt

SEQ ID NO: 22184 - RNA, 21 nt, synthetic construct
  source 1..21: mol_type = other RNA; note = Description of Artificial Sequence: Synthetic oligonucleotide
gaaaatcaggacatgcctatt

SEQ ID NO: 22185 - RNA, 21 nt, synthetic construct
  source 1..21: mol_type = other RNA; note = Description of Artificial Sequence: Synthetic oligonucleotide
aaaatcaggacatgcctgatt

SEQ ID NO: 22186 - RNA, 21 nt, synthetic construct
  source 1..21: mol_type = other RNA; note = Description of Artificial Sequence: Synthetic oligonucleotide
aaatcaggacatgcctgcatt

SEQ ID NO: 22187 - RNA, 21 nt, synthetic construct
  source 1..21: mol_type = other RNA; note = Description of Artificial Sequence: Synthetic oligonucleotide
aatcaggacatgcctgctatt

SEQ ID NO: 22188 - RNA, 21 nt, synthetic construct
  source 1..21: mol_type = other RNA; note = Description of Artificial Sequence: Synthetic oligonucleotide
atcaggacatgcctgcttatt

SEQ ID NO: 22189 - RNA, 21 nt, synthetic construct
  source 1..21: mol_type = other RNA; note = Description of Artificial Sequence: Synthetic oligonucleotide
tcaggacatgcctgctttatt

SEQ ID NO: 22190 - RNA, 21 nt, synthetic construct
  source 1..21: mol_type = other RNA; note = Description of Artificial Sequence: Synthetic oligonucleotide
caggacatgcctgctttcatt

SEQ ID NO: 22191 - RNA, 21 nt, synthetic construct
  source 1..21: mol_type = other RNA; note = Description of Artificial Sequence: Synthetic oligonucleotide
aggacatgcctgctttctatt

SEQ ID NO: 22192 - RNA, 21 nt, synthetic construct
  source 1..21: mol_type = other RNA; note = Description of Artificial Sequence: Synthetic oligonucleotide
ggacatgcctgctttctaatt

SEQ ID NO: 22193 - RNA, 21 nt, synthetic construct
  source 1..21: mol_type = other RNA; note = Description of Artificial Sequence: Synthetic oligonucleotide
gacatgcctgctttctaaatt

SEQ ID NO: 22194 - RNA, 21 nt, synthetic construct
  source 1..21: mol_type = other RNA; note = Description of Artificial Sequence: Synthetic oligonucleotide
acatgcctgctttctaaaatt

SEQ ID NO: 22195 - RNA, 21 nt, synthetic construct
  source 1..21: mol_type = other RNA; note = Description of Artificial Sequence: Synthetic oligonucleotide
catgcctgctttctaaaaatt

SEQ ID NO: 22196 - RNA, 21 nt, synthetic construct
  source 1..21: mol_type = other RNA; note = Description of Artificial Sequence: Synthetic oligonucleotide
atgcctgctttctaaaaaatt

SEQ ID NO: 22197 - RNA, 21 nt, synthetic construct
  source 1..21: mol_type = other RNA; note = Description of Artificial Sequence: Synthetic oligonucleotide
tgcctgctttctaaaaatatt

SEQ ID NO: 22198 - RNA, 21 nt, synthetic construct
  source 1..21: mol_type = other RNA; note = Description of Artificial Sequence: Synthetic oligonucleotide
gcctgctttctaaaaatcatt

SEQ ID NO: 22199 - RNA, 21 nt, synthetic construct
  source 1..21: mol_type = other RNA; note = Description of Artificial Sequence: Synthetic oligonucleotide
cctgctttctaaaaatctatt

SEQ ID NO: 22200 - RNA, 21 nt, synthetic construct
  source 1..21: mol_type = other RNA; note = Description of Artificial Sequence: Synthetic oligonucleotide
ctgctttctaaaaatcttatt

SEQ ID NO: 22201 - RNA, 21 nt, synthetic construct
  source 1..21: mol_type = other RNA; note = Description of Artificial Sequence: Synthetic oligonucleotide
tgctttctaaaaatcttcatt

SEQ ID NO: 22202 - RNA, 21 nt, synthetic construct
  source 1..21: mol_type = other RNA; note = Description of Artificial Sequence: Synthetic oligonucleotide
gctttctaaaaatcttccatt

SEQ ID NO: 22203 - RNA, 21 nt, synthetic construct
  source 1..21: mol_type = other RNA; note = Description of Artificial Sequence: Synthetic oligonucleotide
ctttctaaaaatcttcctatt

SEQ ID NO: 22204 - RNA, 21 nt, synthetic construct
  source 1..21: mol_type = other RNA; note = Description of Artificial Sequence: Synthetic oligonucleotide
tttctaaaaatcttcctcatt

SEQ ID NO: 22205 - RNA, 21 nt, synthetic construct
  source 1..21: mol_type = other RNA; note = Description of Artificial Sequence: Synthetic oligonucleotide
ttctaaaaatcttcctctatt

SEQ ID NO: 22206 - RNA, 21 nt, synthetic construct
  source 1..21: mol_type = other RNA; note = Description of Artificial Sequence: Synthetic oligonucleotide
tctaaaaatcttcctctgatt

SEQ ID NO: 22207 - RNA, 21 nt, synthetic construct
  source 1..21: mol_type = other RNA; note = Description of Artificial Sequence: Synthetic oligonucleotide
ctaaaaatcttcctctgaatt

SEQ ID NO: 22208 - RNA, 21 nt, synthetic construct
  source 1..21: mol_type = other RNA; note = Description of Artificial Sequence: Synthetic oligonucleotide
taaaaatcttcctctgaaatt

SEQ ID NO: 22209 - RNA, 21 nt, synthetic construct
  source 1..21: mol_type = other RNA; note = Description of Artificial Sequence: Synthetic oligonucleotide
aaaaatcttcctctgaagatt

SEQ ID NO: 22210 - RNA, 21 nt, synthetic construct
  source 1..21: mol_type = other RNA; note = Description of Artificial Sequence: Synthetic oligonucleotide
aaaatcttcctctgaagaatt

SEQ ID NO: 22211 - RNA, 21 nt, synthetic construct
  source 1..21: mol_type = other RNA; note = Description of Artificial Sequence: Synthetic oligonucleotide
aaatcttcctctgaagacatt

SEQ ID NO: 22212 - RNA, 21 nt, synthetic construct
  source 1..21: mol_type = other RNA; note = Description of Artificial Sequence: Synthetic oligonucleotide
aatcttcctctgaagaccatt

SEQ ID NO: 22213 - RNA, 21 nt, synthetic construct
  source 1..21: mol_type = other RNA; note = Description of Artificial Sequence: Synthetic oligonucleotide
atcttcctctgaagacctatt

SEQ ID NO: 22214 - RNA, 21 nt, synthetic construct
  source 1..21: mol_type = other RNA; note = Description of Artificial Sequence: Synthetic oligonucleotide
tcttcctctgaagacctgatt

SEQ ID NO: 22215 - RNA, 21 nt, synthetic construct
  source 1..21: mol_type = other RNA; note = Description of Artificial Sequence: Synthetic oligonucleotide
cttcctctgaagacctgaatt

SEQ ID NO: 22216 - RNA, 21 nt, synthetic construct
  source 1..21: mol_type = other RNA; note = Description of Artificial Sequence: Synthetic oligonucleotide
ttcctctgaagacctgacatt

SEQ ID NO: 22217 - RNA, 21 nt, synthetic construct
  source 1..21: mol_type = other RNA; note = Description of Artificial Sequence: Synthetic oligonucleotide
tcctctgaagacctgaccatt

SEQ ID NO: 22218 - RNA, 21 nt, synthetic construct
  source 1..21: mol_type = other RNA; note = Description of Artificial Sequence: Synthetic oligonucleotide
cctctgaagacctgacccatt

SEQ ID NO: 22219 - RNA, 21 nt, synthetic construct
  source 1..21: mol_type = other RNA; note = Description of Artificial Sequence: Synthetic oligonucleotide
ctctgaagacctgacccaatt

SEQ ID NO: 22220 - RNA, 21 nt, synthetic construct
  source 1..21: mol_type = other RNA; note = Description of Artificial Sequence: Synthetic oligonucleotide
tctgaagacctgacccaaatt

SEQ ID NO: 22221 - RNA, 21 nt, synthetic construct
  source 1..21: mol_type = other RNA; note = Description of Artificial Sequence: Synthetic oligonucleotide
ctgaagacctgacccaagatt

SEQ ID NO: 22222 - RNA, 21 nt, synthetic construct
  source 1..21: mol_type = other RNA; note = Description of Artificial Sequence: Synthetic oligonucleotide
tgaagacctgacccaagcatt

SEQ ID NO: 22223 - RNA, 21 nt, synthetic construct
  source 1..21: mol_type = other RNA; note = Description of Artificial Sequence: Synthetic oligonucleotide
gaagacctgacccaagctatt

SEQ ID NO: 22224 - RNA, 21 nt, synthetic construct
  source 1..21: mol_type = other RNA; note = Description of Artificial Sequence: Synthetic oligonucleotide
aagacctgacccaagctcatt

SEQ ID NO: 22225 - RNA, 21 nt, synthetic construct
  source 1..21: mol_type = other RNA; note = Description of Artificial Sequence: Synthetic oligonucleotide
agacctgacccaagctctatt

SEQ ID NO: 22226 - RNA, 21 nt, synthetic construct
  source 1..21: mol_type = other RNA; note = Description of Artificial Sequence: Synthetic oligonucleotide
gacctgacccaagctcttatt

SEQ ID NO: 22227 - RNA, 21 nt, synthetic construct
  source 1..21: mol_type = other RNA; note = Description of Artificial Sequence: Synthetic oligonucleotide
acctgacccaagctcttaatt

SEQ ID NO: 22228 - RNA, 21 nt, synthetic construct
  source 1..21: mol_type = other RNA; note = Description of Artificial Sequence: Synthetic oligonucleotide
cctgacccaagctcttaaatt

SEQ ID NO: 22229 - RNA, 21 nt, synthetic construct
  source 1..21: mol_type = other RNA; note = Description of Artificial Sequence: Synthetic oligonucleotide
ctgacccaagctcttaaaatt

SEQ ID NO: 22230 - RNA, 21 nt, synthetic construct
  source 1..21: mol_type = other RNA; note = Description of Artificial Sequence: Synthetic oligonucleotide
tgacccaagctcttaaatatt

SEQ ID NO: 22231 - RNA, 21 nt, synthetic construct
  source 1..21: mol_type = other RNA; note = Description of Artificial Sequence: Synthetic oligonucleotide
gacccaagctcttaaatgatt

SEQ ID NO: 22232 - RNA, 21 nt, synthetic construct
  source 1..21: mol_type = other RNA; note = Description of Artificial Sequence: Synthetic oligonucleotide
acccaagctcttaaatgcatt

SEQ ID NO: 22233 - RNA, 21 nt, synthetic construct
  source 1..21: mol_type = other RNA; note = Description of Artificial Sequence: Synthetic oligonucleotide
cccaagctcttaaatgctatt

SEQ ID NO: 22234 - RNA, 21 nt, synthetic construct
  source 1..21: mol_type = other RNA; note = Description of Artificial Sequence: Synthetic oligonucleotide
ccaagctcttaaatgctaatt

SEQ ID NO: 22235 - RNA, 21 nt, synthetic construct
  source 1..21: mol_type = other RNA; note = Description of Artificial Sequence: Synthetic oligonucleotide
caagctcttaaatgctatatt

SEQ ID NO: 22236 - RNA, 21 nt, synthetic construct
  source 1..21: mol_type = other RNA; note = Description of Artificial Sequence: Synthetic oligonucleotide
aagctcttaaatgctattatt

SEQ ID NO: 22237 - RNA, 21 nt, synthetic construct
  source 1..21: mol_type = other RNA; note = Description of Artificial Sequence: Synthetic oligonucleotide
agctcttaaatgctattgatt

SEQ ID NO: 22238 - RNA, 21 nt, synthetic construct
  source 1..21: mol_type = other RNA; note = Description of Artificial Sequence: Synthetic oligonucleotide
gctcttaaatgctattgtatt

SEQ ID NO: 22239 - RNA, 21 nt, synthetic construct
  source 1..21: mol_type = other RNA; note = Description of Artificial Sequence: Synthetic oligonucleotide
ctcttaaatgctattgtaatt

SEQ ID NO: 22240 - RNA, 21 nt, synthetic construct
  source 1..21: mol_type = other RNA; note = Description of Artificial Sequence: Synthetic oligonucleotide
tcttaaatgctattgtaaatt

SEQ ID NO: 22241 - RNA, 21 nt, synthetic construct
  source 1..21: mol_type = other RNA; note = Description of Artificial Sequence: Synthetic oligonucleotide
cttaaatgctattgtaagatt

SEQ ID NO: 22242 - RNA, 21 nt, synthetic construct
  source 1..21: mol_type = other RNA; note = Description of Artificial Sequence: Synthetic oligonucleotide
ttaaatgctattgtaagaatt

SEQ ID NO: 22243 - RNA, 21 nt, synthetic construct
  source 1..21: mol_type = other RNA; note = Description of Artificial Sequence: Synthetic oligonucleotide
taaatgctattgtaagagatt

SEQ ID NO: 22244 - RNA, 21 nt, synthetic construct
  source 1..21: mol_type = other RNA; note = Description of Artificial Sequence: Synthetic oligonucleotide
aaatgctattgtaagagaatt

SEQ ID NO: 22245 - RNA, 21 nt, synthetic construct
  source 1..21: mol_type = other RNA; note = Description of Artificial Sequence: Synthetic oligonucleotide
aatgctattgtaagagaaatt

SEQ ID NO: 22246 - RNA, 21 nt, synthetic construct
  source 1..21: mol_type = other RNA; note = Description of Artificial Sequence: Synthetic oligonucleotide
atgctattgtaagagaaaatt

SEQ ID NO: 22247 - RNA, 21 nt, synthetic construct
  source 1..21: mol_type = other RNA; note = Description of Artificial Sequence: Synthetic oligonucleotide
tgctattgtaagagaaatatt

SEQ ID NO: 22248 - RNA, 21 nt, synthetic construct
  source 1..21: mol_type = other RNA; note = Description of Artificial Sequence: Synthetic oligonucleotide
gctattgtaagagaaattatt

SEQ ID NO: 22249 - RNA, 21 nt, synthetic construct
  source 1..21: mol_type = other RNA; note = Description of Artificial Sequence: Synthetic oligonucleotide
ctattgtaagagaaatttatt

SEQ ID NO: 22250 - RNA, 21 nt, synthetic construct
  source 1..21: mol_type = other RNA; note = Description of Artificial Sequence: Synthetic oligonucleotide
tattgtaagagaaatttcatt

SEQ ID NO: 22251 - RNA, 21 nt, synthetic construct
  source 1..21: mol_type = other RNA; note = Description of Artificial Sequence: Synthetic oligonucleotide
attgtaagagaaatttctatt

SEQ ID NO: 22252 - RNA, 21 nt, synthetic construct
  source 1..21: mol_type = other RNA; note = Description of Artificial Sequence: Synthetic oligonucleotide
ttgtaagagaaatttcttatt

SEQ ID NO: 22253 - RNA, 21 nt, synthetic construct
  source 1..21: mol_type = other RNA; note = Description of Artificial Sequence: Synthetic oligonucleotide
tgtaagagaaatttctttatt

SEQ ID NO: 22254 - RNA, 21 nt, synthetic construct
  source 1..21: mol_type = other RNA; note = Description of Artificial Sequence: Synthetic oligonucleotide
gtaagagaaatttctttgatt

SEQ ID NO: 22255 - RNA, 21 nt, synthetic construct
  source 1..21: mol_type = other RNA; note = Description of Artificial Sequence: Synthetic oligonucleotide
taagagaaatttctttgtatt

SEQ ID NO: 22256 - RNA, 21 nt, synthetic construct
  source 1..21: mol_type = other RNA; note = Description of Artificial Sequence: Synthetic oligonucleotide
aagagaaatttctttgtcatt

SEQ ID NO: 22257 - RNA, 21 nt, synthetic construct
  source 1..21: mol_type = other RNA; note = Description of Artificial Sequence: Synthetic oligonucleotide
agagaaatttctttgtctatt

SEQ ID NO: 22258 - RNA, 21 nt, synthetic construct
  source 1..21: mol_type = other RNA; note = Description of Artificial Sequence: Synthetic oligonucleotide
gagaaatttctttgtctaatt

SEQ ID NO: 22259 - RNA, 21 nt, synthetic construct
  source 1..21: mol_type = other RNA; note = Description of Artificial Sequence: Synthetic oligonucleotide
agaaatttctttgtctatatt

SEQ ID NO: 22260 - RNA, 21 nt, synthetic construct
  source 1..21: mol_type = other RNA; note = Description of Artificial Sequence: Synthetic oligonucleotide
gaaatttctttgtctattatt

SEQ ID NO: 22261 - RNA, 21 nt, synthetic construct
  source 1..21: mol_type = other RNA; note = Description of Artificial Sequence: Synthetic oligonucleotide
aaatttctttgtctattaatt

SEQ ID NO: 22262 - RNA, 21 nt, synthetic construct
  source 1..21: mol_type = other RNA; note = Description of Artificial Sequence: Synthetic oligonucleotide
aatttctttgtctattaaatt

SEQ ID NO: 22263 - RNA, 21 nt, synthetic construct
  source 1..21: mol_type = other RNA; note = Description of Artificial Sequence: Synthetic oligonucleotide
atttctttgtctattaacatt

SEQ ID NO: 22264 - RNA, 21 nt, synthetic construct
  source 1..21: mol_type = other RNA; note = Description of Artificial Sequence: Synthetic oligonucleotide
tttctttgtctattaactatt

SEQ ID NO: 22265 - RNA, 21 nt, synthetic construct
  source 1..21: mol_type = other RNA; note = Description of Artificial Sequence: Synthetic oligonucleotide
ttctttgtctattaactcatt

SEQ ID NO: 22266 - RNA, 21 nt, synthetic construct
  source 1..21: mol_type = other RNA; note = Description of Artificial Sequence: Synthetic oligonucleotide
tctttgtctattaactccatt

SEQ ID NO: 22267 - RNA, 21 nt, synthetic construct
  source 1..21: mol_type = other RNA; note = Description of Artificial Sequence: Synthetic oligonucleotide
ctttgtctattaactccaatt

SEQ ID NO: 22268 - RNA, 21 nt, synthetic construct
  source 1..21: mol_type = other RNA; note = Description of Artificial Sequence: Synthetic oligonucleotide
tttgtctattaactccatatt

SEQ ID NO: 22269 - RNA, 21 nt, synthetic construct
  source 1..21: mol_type = other RNA; note = Description of Artificial Sequence: Synthetic oligonucleotide
ttgtctattaactccattatt

SEQ ID NO: 22270 - RNA, 21 nt, synthetic construct
  source 1..21: mol_type = other RNA; note = Description of Artificial Sequence: Synthetic oligonucleotide
tgtctattaactccatttatt

SEQ ID NO: 22271 - RNA, 21 nt, synthetic construct
  source 1..21: mol_type = other RNA; note = Description of Artificial Sequence: Synthetic oligonucleotide
gtctattaactccattttatt

SEQ ID NO: 22272 - RNA, 21 nt, synthetic construct
  source 1..21: mol_type = other RNA; note = Description of Artificial Sequence: Synthetic oligonucleotide
tctattaactccattttaatt

SEQ ID NO: 22273 - RNA, 21 nt, synthetic construct
  source 1..21: mol_type = other RNA; note = Description of Artificial Sequence: Synthetic oligonucleotide
ctattaactccattttagatt

SEQ ID NO: 22274 - RNA, 21 nt, synthetic construct
  source 1..21: mol_type = other RNA; note = Description of Artificial Sequence: Synthetic oligonucleotide
tattaactccattttagtatt

SEQ ID NO: 22275 - RNA, 21 nt, synthetic construct
  source 1..21: mol_type = other RNA; note = Description of Artificial Sequence: Synthetic oligonucleotide
attaactccattttagtaatt

SEQ ID NO: 22276 - RNA, 21 nt, synthetic construct
  source 1..21: mol_type = other RNA; note = Description of Artificial Sequence: Synthetic oligonucleotide
ttaactccattttagtagatt

SEQ ID NO: 22277 - RNA, 21 nt, synthetic construct
  source 1..21: mol_type = other RNA; note = Description of Artificial Sequence: Synthetic oligonucleotide
taactccattttagtaggatt

SEQ ID NO: 22278 - RNA, 21 nt, synthetic construct
  source 1..21: mol_type = other RNA; note = Description of Artificial Sequence: Synthetic oligonucleotide
aactccattttagtagggatt

SEQ ID NO: 22279 - RNA, 21 nt, synthetic construct
  source 1..21: mol_type = other RNA; note = Description of Artificial Sequence: Synthetic oligonucleotide
actccattttagtagggaatt

SEQ ID NO: 22280 - RNA, 21 nt, synthetic construct
  source 1..21: mol_type = other RNA; note = Description of Artificial Sequence: Synthetic oligonucleotide
ctccattttagtagggatatt

SEQ ID NO: 22281 - RNA, 21 nt, synthetic construct
  source 1..21: mol_type = other RNA; note = Description of Artificial Sequence: Synthetic oligonucleotide
tccattttagtagggattatt

SEQ ID NO: 22282 - RNA, 21 nt, synthetic construct
  source 1..21: mol_type = other RNA; note = Description of Artificial Sequence: Synthetic oligonucleotide
ccattttagtagggattcatt

SEQ ID NO: 22283 - RNA, 21 nt, synthetic construct
  source 1..21: mol_type = other RNA; note = Description of Artificial Sequence: Synthetic oligonucleotide
cattttagtagggattcaatt

SEQ ID NO: 22284 - RNA, 21 nt, synthetic construct
  source 1..21: mol_type = other RNA; note = Description of Artificial Sequence: Synthetic oligonucleotide
attttagtagggattcacatt

SEQ ID NO: 22285 - RNA, 21 nt, synthetic construct
  source 1..21: mol_type = other RNA; note = Description of Artificial Sequence: Synthetic oligonucleotide
ttttagtagggattcactatt

SEQ ID NO: 22286 - RNA, 21 nt, synthetic construct
  source 1..21: mol_type = other RNA; note = Description of Artificial Sequence: Synthetic oligonucleotide
tttagtagggattcactgatt

SEQ ID NO: 22287 - RNA, 21 nt, synthetic construct
  source 1..21: mol_type = other RNA; note = Description of Artificial Sequence: Synthetic oligonucleotide
ttagtagggattcactgaatt

SEQ ID NO: 22288 - RNA, 21 nt, synthetic construct
  source 1..21: mol_type = other RNA; note = Description of Artificial Sequence: Synthetic oligonucleotide
tagtagggattcactgacatt

SEQ ID NO: 22289 - RNA, 21 nt, synthetic construct
  source 1..21: mol_type = other RNA; note = Description of Artificial Sequence: Synthetic oligonucleotide
agtagggattcactgactatt

SEQ ID NO: 22290 - RNA, 21 nt, synthetic construct
  source 1..21: mol_type = other RNA; note = Description of Artificial Sequence: Synthetic oligonucleotide
gtagggattcactgactaatt

SEQ ID NO: 22291 - RNA, 21 nt, synthetic construct
  source 1..21: mol_type = other RNA; note = Description of Artificial Sequence: Synthetic oligonucleotide
tagggattcactgactagatt

SEQ ID NO: 22292 - RNA, 21 nt, synthetic construct
  source 1..21: mol_type = other RNA; note = Description of Artificial Sequence: Synthetic oligonucleotide
agggattcactgactagaatt

SEQ ID NO: 22293 - RNA, 21 nt, synthetic construct
  source 1..21: mol_type = other RNA; note = Description of Artificial Sequence: Synthetic oligonucleotide
gggattcactgactagatatt

SEQ ID NO: 22294 - RNA, 21 nt, synthetic construct
  source 1..21: mol_type = other RNA; note = Description of Artificial Sequence: Synthetic oligonucleotide
ggattcactgactagattatt

SEQ ID NO: 22295 - RNA, 21 nt, synthetic construct
  source 1..21: mol_type = other RNA; note = Description of Artificial Sequence: Synthetic oligonucleotide
gattcactgactagatttatt

SEQ ID NO: 22296 - RNA, 21 nt, synthetic construct
  source 1..21: mol_type = other RNA; note = Description of Artificial Sequence: Synthetic oligonucleotide
attcactgactagattttatt

SEQ ID NO: 22297 - RNA, 21 nt, synthetic construct
  source 1..21: mol_type = other RNA; note = Description of Artificial Sequence: Synthetic oligonucleotide
ttcactgactagattttaatt

SEQ ID NO: 22298 - RNA, 21 nt, synthetic construct
  source 1..21: mol_type = other RNA; note = Description of Artificial Sequence: Synthetic oligonucleotide
tcactgactagattttacatt

SEQ ID NO: 22299 - RNA, 21 nt, synthetic construct
  source 1..21: mol_type = other RNA; note = Description of Artificial Sequence: Synthetic oligonucleotide
cactgactagattttactatt

SEQ ID NO: 22300 - RNA, 21 nt, synthetic construct
  source 1..21: mol_type = other RNA; note = Description of Artificial Sequence: Synthetic oligonucleotide
actgactagattttactgatt

SEQ ID NO: 22301 - RNA, 21 nt, synthetic construct
  source 1..21: mol_type = other RNA; note = Description of Artificial Sequence: Synthetic oligonucleotide
ctgactagattttactgaatt

SEQ ID NO: 22302 - RNA, 21 nt, synthetic construct
  source 1..21: mol_type = other RNA; note = Description of Artificial Sequence: Synthetic oligonucleotide
tgactagattttactgaaatt

SEQ ID NO: 22303 - RNA, 21 nt, synthetic construct
  source 1..21: mol_type = other RNA; note = Description of Artificial Sequence: Synthetic oligonucleotide
gactagattttactgaacatt

SEQ ID NO: 22304 - RNA, 21 nt, synthetic construct
  source 1..21: mol_type = other RNA; note = Description of Artificial Sequence: Synthetic oligonucleotide
actagattttactgaactatt

SEQ ID NO: 22305 - RNA, 21 nt, synthetic construct
  source 1..21: mol_type = other RNA; note = Description of Artificial Sequence: Synthetic oligonucleotide
ctagattttactgaactaatt

SEQ ID NO: 22306 - RNA, 21 nt, synthetic construct
  source 1..21: mol_type = other RNA; note = Description of Artificial Sequence: Synthetic oligonucleotide
tagattttactgaactatatt

SEQ ID NO: 22307 - RNA, 21 nt, synthetic construct
  source 1..21: mol_type = other RNA; note = Description of Artificial Sequence: Synthetic oligonucleotide
agattttactgaactatgatt

SEQ ID NO: 22308 - RNA, 21 nt, synthetic construct
  source 1..21: mol_type = other RNA; note = Description of Artificial Sequence: Synthetic oligonucleotide
gattttactgaactatgaatt

SEQ ID NO: 22309 - RNA, 21 nt, synthetic construct
  source 1..21: mol_type = other RNA; note = Description of Artificial Sequence: Synthetic oligonucleotide
attttactgaactatgaaatt

SEQ ID NO: 22310 - RNA, 21 nt, synthetic construct
  source 1..21: mol_type = other RNA; note = Description of Artificial Sequence: Synthetic oligonucleotide
ttttactgaactatgaaaatt

SEQ ID NO: 22311 - RNA, 21 nt, synthetic construct
  source 1..21: mol_type = other RNA; note = Description of Artificial Sequence: Synthetic oligonucleotide
tttactgaactatgaaaaatt

SEQ ID NO: 22312 - RNA, 21 nt, synthetic construct
  source 1..21: mol_type = other RNA; note = Description of Artificial Sequence: Synthetic oligonucleotide
ttactgaactatgaaaatatt

SEQ ID NO: 22313 - RNA, 21 nt, synthetic construct
  source 1..21: mol_type = other RNA; note = Description of Artificial Sequence: Synthetic oligonucleotide
tactgaactatgaaaataatt

SEQ ID NO: 22314 - RNA, 21 nt, synthetic construct
  source 1..21: mol_type = other RNA; note = Description of Artificial Sequence: Synthetic oligonucleotide
actgaactatgaaaataaatt

SEQ ID NO: 22315 - RNA, 21 nt, synthetic construct
  source 1..21: mol_type = other RNA; note = Description of Artificial Sequence: Synthetic oligonucleotide
ctgaactatgaaaataaaatt

SEQ ID NO: 22316 - RNA, 21 nt, synthetic construct
  source 1..21: mol_type = other RNA; note = Description of Artificial Sequence: Synthetic oligonucleotide
tgaactatgaaaataaatatt

SEQ ID NO: 22317 - RNA, 21 nt, synthetic construct
  source 1..21: mol_type = other RNA; note = Description of Artificial Sequence: Synthetic oligonucleotide
gaactatgaaaataaataatt

SEQ ID NO: 22318 - RNA, 21 nt, synthetic construct
  source 1..21: mol_type = other RNA; note = Description of Artificial Sequence: Synthetic oligonucleotide
aactatgaaaataaatacatt

SEQ ID NO: 22319 - RNA, 21 nt, synthetic construct
  source 1..21: mol_type = other RNA; note = Description of Artificial Sequence: Synthetic oligonucleotide
actatgaaaataaatacaatt

SEQ ID NO: 22320 - RNA, 21 nt, synthetic construct
  source 1..21: mol_type = other RNA; note = Description of Artificial Sequence: Synthetic oligonucleotide
ctatgaaaataaatacacatt

SEQ ID NO: 22321 - RNA, 21 nt, synthetic construct
  source 1..21: mol_type = other RNA; note = Description of Artificial Sequence: Synthetic oligonucleotide
tatgaaaataaatacacaatt

SEQ ID NO: 22322 - RNA, 21 nt, synthetic construct
  source 1..21: mol_type = other RNA; note = Description of Artificial Sequence: Synthetic oligonucleotide
atgaaaataaatacacatatt

SEQ ID NO: 22323 - RNA, 21 nt, synthetic construct
  source 1..21: mol_type = other RNA; note = Description of Artificial Sequence: Synthetic oligonucleotide
tgaaaataaatacacataatt

SEQ ID NO: 22324 - RNA, 21 nt, synthetic construct
  source 1..21: mol_type = other RNA; note = Description of Artificial Sequence: Synthetic oligonucleotide
gaaaataaatacacataaatt

SEQ ID NO: 22325 - RNA, 21 nt, synthetic construct
  source 1..21: mol_type = other RNA; note = Description of Artificial Sequence: Synthetic oligonucleotide
aaaataaatacacataatatt

SEQ ID NO: 22326 - RNA, 21 nt, synthetic construct
  source 1..21: mol_type = other RNA; note = Description of Artificial Sequence: Synthetic oligonucleotide
aaataaatacacataattatt

SEQ ID NO: 22327 - RNA, 21 nt, synthetic construct
  source 1..21: mol_type = other RNA; note = Description of Artificial Sequence: Synthetic oligonucleotide
aataaatacacataatttatt

SEQ ID NO: 22328 - RNA, 21 nt, synthetic construct
  source 1..21: mol_type = other RNA; note = Description of Artificial Sequence: Synthetic oligonucleotide
ataaatacacataattttatt

SEQ ID NO: 22329 - RNA, 21 nt, synthetic construct
  source 1..21: mol_type = other RNA; note = Description of Artificial Sequence: Synthetic oligonucleotide
taaatacacataatttttatt

SEQ ID NO: 22330 - RNA, 21 nt, synthetic construct
  source 1..21: mol_type = other RNA; note = Description of Artificial Sequence: Synthetic oligonucleotide
aaatacacataatttttcatt

SEQ ID NO: 22331 - RNA, 21 nt, synthetic construct
  source 1..21: mol_type = other RNA; note = Description of Artificial Sequence: Synthetic oligonucleotide
aatacacataatttttcaatt

SEQ ID NO: 22332 - RNA, 21 nt, synthetic construct
  source 1..21: mol_type = other RNA; note = Description of Artificial Sequence: Synthetic oligonucleotide
atacacataatttttcacatt

SEQ ID NO: 22333 - RNA, 21 nt, synthetic construct
  source 1..21: mol_type = other RNA; note = Description of Artificial Sequence: Synthetic oligonucleotide
tacacataatttttcacaatt

SEQ ID NO: 22334 - RNA, 21 nt, synthetic construct
  source 1..21: mol_type = other RNA; note = Description of Artificial Sequence: Synthetic oligonucleotide
acacataatttttcacaaatt

SEQ ID NO: 22335 - RNA, 21 nt, synthetic construct
  source 1..21: mol_type = other RNA; note = Description of Artificial Sequence: Synthetic oligonucleotide
cacataatttttcacaaaatt

SEQ ID NO: 22336 - RNA, 21 nt, synthetic construct
  source 1..21: mol_type = other RNA; note = Description of Artificial Sequence: Synthetic oligonucleotide
acataatttttcacaaaaatt

SEQ ID NO: 22337 - RNA, 21 nt, synthetic construct
  source 1..21: mol_type = other RNA; note = Description of Artificial Sequence: Synthetic oligonucleotide
cataatttttcacaaaatatt

SEQ ID NO: 22338 - RNA, 21 nt, synthetic construct
  source 1..21: mol_type = other RNA; note = Description of Artificial Sequence: Synthetic oligonucleotide
ataatttttcacaaaattatt

SEQ ID NO: 22339 - RNA, 21 nt, synthetic construct
  source 1..21: mol_type = other RNA; note = Description of Artificial Sequence: Synthetic oligonucleotide
taatttttcacaaaatttatt

SEQ ID NO: 22340 - RNA, 21 nt, synthetic construct
  source 1..21: mol_type = other RNA; note = Description of Artificial Sequence: Synthetic oligonucleotide
aatttttcacaaaattttatt

SEQ ID NO: 22341 - RNA, 21 nt, synthetic construct
  source 1..21: mol_type = other RNA; note = Description of Artificial Sequence: Synthetic oligonucleotide
atttttcacaaaattttgatt

SEQ ID NO: 22342 - RNA, 21 nt, synthetic construct
  source 1..21: mol_type = other RNA; note = Description of Artificial Sequence: Synthetic oligonucleotide
tttttcacaaaattttggatt

SEQ ID NO: 22343 - RNA, 21 nt, synthetic construct
  source 1..21: mol_type = other RNA; note = Description of Artificial Sequence: Synthetic oligonucleotide
ttttcacaaaattttgggatt

SEQ ID NO: 22344 - RNA, 21 nt, synthetic construct
  source 1..21: mol_type = other RNA; note = Description of Artificial Sequence: Synthetic oligonucleotide
tttcacaaaattttgggcatt

SEQ ID NO: 22345 - RNA, 21 nt, synthetic construct
  source 1..21: mol_type = other RNA; note = Description of Artificial Sequence: Synthetic oligonucleotide
ttcacaaaattttgggccatt

SEQ ID NO: 22346 - RNA, 21 nt, synthetic construct
  source 1..21: mol_type = other RNA; note = Description of Artificial Sequence: Synthetic oligonucleotide
tcacaaaattttgggcccatt

SEQ ID NO: 22347 - RNA, 21 nt, synthetic construct
  source 1..21: mol_type = other RNA; note = Description of Artificial Sequence: Synthetic oligonucleotide
cacaaaattttgggcccaatt

SEQ ID NO: 22348 - RNA, 21 nt, synthetic construct
  source 1..21: mol_type = other RNA; note = Description of Artificial Sequence: Synthetic oligonucleotide
acaaaattttgggcccaaatt

SEQ ID NO: 22349 - RNA, 21 nt, synthetic construct
  source 1..21: mol_type = other RNA; note = Description of Artificial Sequence: Synthetic oligonucleotide
caaaattttgggcccaatatt

SEQ ID NO: 22350 - RNA, 21 nt, synthetic construct
  source 1..21: mol_type = other RNA; note = Description of Artificial Sequence: Synthetic oligonucleotide
aaaattttgggcccaattatt

SEQ ID NO: 22351 - RNA, 21 nt, synthetic construct
  source 1..21: mol_type = other RNA; note = Description of Artificial Sequence: Synthetic oligonucleotide
aaattttgggcccaattcatt

SEQ ID NO: 22352 - RNA, 21 nt, synthetic construct
  source 1..21: mol_type = other RNA; note = Description of Artificial Sequence: Synthetic oligonucleotide
aattttgggcccaattccatt

SEQ ID NO: 22353 - RNA, 21 nt, synthetic construct
  source 1..21: mol_type = other RNA; note = Description of Artificial Sequence: Synthetic oligonucleotide
attttgggcccaattcccatt

SEQ ID NO: 22354 - RNA, 21 nt, synthetic construct
  source 1..21: mol_type = other RNA; note = Description of Artificial Sequence: Synthetic oligonucleotide
ttttgggcccaattccccatt

SEQ ID NO: 22355 - RNA, 21 nt, synthetic construct
  source 1..21: mol_type = other RNA; note = Description of Artificial Sequence: Synthetic oligonucleotide
tttgggcccaattcccctatt

SEQ ID NO: 22356 - RNA, 21 nt, synthetic construct
  source 1..21: mol_type = other RNA; note = Description of Artificial Sequence: Synthetic oligonucleotide
ttgggcccaattcccctaatt

SEQ ID NO: 22357 - RNA, 21 nt, synthetic construct
  source 1..21: mol_type = other RNA; note = Description of Artificial Sequence: Synthetic oligonucleotide
tgggcccaattcccctaaatt

SEQ ID NO: 22358 - RNA, 21 nt, synthetic construct
  source 1..21: mol_type = other RNA; note = Description of Artificial Sequence: Synthetic oligonucleotide
gggcccaattcccctaaaatt

SEQ ID NO: 22359 - RNA, 21 nt, synthetic construct
  source 1..21: mol_type = other RNA; note = Description of Artificial Sequence: Synthetic oligonucleotide
ggcccaattcccctaaaaatt

SEQ ID NO: 22360 - RNA, 21 nt, synthetic construct
  source 1..21: mol_type = other RNA; note = Description of Artificial Sequence: Synthetic oligonucleotide
gcccaattcccctaaaagatt

SEQ ID NO: 22361 - RNA, 21 nt, synthetic construct
  source 1..21: mol_type = other RNA; note = Description of Artificial Sequence: Synthetic oligonucleotide
cccaattcccctaaaagaatt

SEQ ID NO: 22362 - RNA, 21 nt, synthetic construct
  source 1..21: mol_type = other RNA; note = Description of Artificial Sequence: Synthetic oligonucleotide
ccaattcccctaaaagaaatt

SEQ ID NO: 22363 - RNA, 21 nt, synthetic construct
  source 1..21: mol_type = other RNA; note = Description of Artificial Sequence: Synthetic oligonucleotide
caattcccctaaaagaatatt

SEQ ID NO: 22364 - RNA, 21 nt, synthetic construct
  source 1..21: mol_type = other RNA; note = Description of Artificial Sequence: Synthetic oligonucleotide
aattcccctaaaagaattatt

SEQ ID NO: 22365 - RNA, 21 nt, synthetic construct
  source 1..21: mol_type = other RNA; note = Description of Artificial Sequence: Synthetic oligonucleotide
attcccctaaaagaattgatt

SEQ ID NO: 22366 - RNA, 21 nt, synthetic construct
  source 1..21: mol_type = other RNA; note = Description of Artificial Sequence: Synthetic oligonucleotide
ttcccctaaaagaattgaatt

SEQ ID NO: 22367 - RNA, 21 nt, synthetic construct
  source 1..21: mol_type = other RNA; note = Description of Artificial Sequence: Synthetic oligonucleotide
tcccctaaaagaattgagatt

SEQ ID NO: 22368 - RNA, 21 nt, synthetic construct
  source 1..21: mol_type = other RNA; note = Description of Artificial Sequence: Synthetic oligonucleotide
cccctaaaagaattgaggatt

SEQ ID NO: 22369 - RNA, 21 nt, synthetic construct
  source 1..21: mol_type = other RNA; note = Description of Artificial Sequence: Synthetic oligonucleotide
ccctaaaagaattgaggaatt

SEQ ID NO: 22370 - RNA, 21 nt, synthetic construct
  source 1..21: mol_type = other RNA; note = Description of Artificial Sequence: Synthetic oligonucleotide
cctaaaagaattgaggatatt

SEQ ID NO: 22371 - RNA, 21 nt, synthetic construct
  source 1..21: mol_type = other RNA; note = Description of Artificial Sequence: Synthetic oligonucleotide
ctaaaagaattgaggattatt

SEQ ID NO: 22372 - RNA, 21 nt, synthetic construct
  source 1..21: mol_type = other RNA; note = Description of Artificial Sequence: Synthetic oligonucleotide
taaaagaattgaggattaatt

SEQ ID NO: 22373 - RNA, 21 nt, synthetic construct
  source 1..21: mol_type = other RNA; note = Description of Artificial Sequence: Synthetic oligonucleotide
aaaagaattgaggattagatt

SEQ ID NO: 22374 - RNA, 21 nt, synthetic construct
  source 1..21: mol_type = other RNA; note = Description of Artificial Sequence: Synthetic oligonucleotide
aaagaattgaggattaggatt

SEQ ID NO: 22375 - RNA, 21 nt, synthetic construct
  source 1..21: mol_type = other RNA; note = Description of Artificial Sequence: Synthetic oligonucleotide
aagaattgaggattagggatt

SEQ ID NO: 22376 - RNA, 21 nt, synthetic construct
  source 1..21: mol_type = other RNA; note = Description of Artificial Sequence: Synthetic oligonucleotide
agaattgaggattagggaatt

SEQ ID NO: 22377 - RNA, 21 nt, synthetic construct
  source 1..21: mol_type = other RNA; note = Description of Artificial Sequence: Synthetic oligonucleotide
gaattgaggattagggagatt

SEQ ID NO: 22378 - RNA, 21 nt, synthetic construct
  source 1..21: mol_type = other RNA; note = Description of Artificial Sequence: Synthetic oligonucleotide
aattgaggattagggagaatt

SEQ ID NO: 22379 - RNA, 21 nt, synthetic construct
  source 1..21: mol_type = other RNA; note = Description of Artificial Sequence: Synthetic oligonucleotide
attgaggattagggagaaatt

SEQ ID NO: 22380 - RNA, 21 nt, synthetic construct
  source 1..21: mol_type = other RNA; note = Description of Artificial Sequence: Synthetic oligonucleotide
ttgaggattagggagaaaatt

SEQ ID NO: 22381 - RNA, 21 nt, synthetic construct
  source 1..21: mol_type = other RNA; note = Description of Artificial Sequence: Synthetic oligonucleotide
tgaggattagggagaaagatt

SEQ ID NO: 22382 - RNA, 21 nt, synthetic construct
  source 1..21: mol_type = other RNA; note = Description of Artificial Sequence: Synthetic oligonucleotide
gaggattagggagaaaggatt

SEQ ID NO: 22383 - RNA, 21 nt, synthetic construct
  source 1..21: mol_type = other RNA; note = Description of Artificial Sequence: Synthetic oligonucleotide
aggattagggagaaaggaatt

SEQ ID NO: 22384 - RNA, 21 nt, synthetic construct
  source 1..21: mol_type = other RNA; note = Description of Artificial Sequence: Synthetic oligonucleotide
ggattagggagaaaggagatt

SEQ ID NO: 22385 - RNA, 21 nt, synthetic construct
  source 1..21: mol_type = other RNA; note = Description of Artificial Sequence: Synthetic oligonucleotide
gattagggagaaaggagaatt

SEQ ID NO: 22386 - RNA, 21 nt, synthetic construct
  source 1..21: mol_type = other RNA; note = Description of Artificial Sequence: Synthetic oligonucleotide
attagggagaaaggagacatt

SEQ ID NO: 22387 - RNA, 21 nt, synthetic construct
  source 1..21: mol_type = other RNA; note = Description of Artificial Sequence: Synthetic oligonucleotide
ttagggagaaaggagacaatt

SEQ ID NO: 22388 - RNA, 21 nt, synthetic construct
  source 1..21: mol_type = other RNA; note = Description of Artificial Sequence: Synthetic oligonucleotide
tagggagaaaggagacaaatt

SEQ ID NO: 22389 - RNA, 21 nt, synthetic construct
  source 1..21: mol_type = other RNA; note = Description of Artificial Sequence: Synthetic oligonucleotide
agggagaaaggagacaacatt

SEQ ID NO: 22390 - RNA, 21 nt, synthetic construct
  source 1..21: mol_type = other RNA; note = Description of Artificial Sequence: Synthetic oligonucleotide
gggagaaaggagacaactatt

SEQ ID NO: 22391 - RNA, 21 nt, synthetic construct
  source 1..21: mol_type = other RNA; note = Description of Artificial Sequence: Synthetic oligonucleotide
ggagaaaggagacaactcatt

SEQ ID NO: 22392 - RNA, 21 nt, synthetic construct
  source 1..21: mol_type = other RNA; note = Description of Artificial Sequence: Synthetic oligonucleotide
gagaaaggagacaactcaatt

SEQ ID NO: 22393 - RNA, 21 nt, synthetic construct
  source 1..21: mol_type = other RNA; note = Description of Artificial Sequence: Synthetic oligonucleotide
agaaaggagacaactcaaatt

SEQ ID NO: 22394 - RNA, 21 nt, synthetic construct
  source 1..21: mol_type = other RNA; note = Description of Artificial Sequence: Synthetic oligonucleotide
gaaaggagacaactcaaaatt

SEQ ID NO: 22395 - RNA, 21 nt, synthetic construct
  source 1..21: mol_type = other RNA; note = Description of Artificial Sequence: Synthetic oligonucleotide
aaaggagacaactcaaagatt

SEQ ID NO: 22396 - RNA, 21 nt, synthetic construct
  source 1..21: mol_type = other RNA; note = Description of Artificial Sequence: Synthetic oligonucleotide
aaggagacaactcaaagtatt

SEQ ID NO: 22397 - RNA, 21 nt, synthetic construct
  source 1..21: mol_type = other RNA; note = Description of Artificial Sequence: Synthetic oligonucleotide
aggagacaactcaaagtcatt

SEQ ID NO: 22398 - RNA, 21 nt, synthetic construct
  source 1..21: mol_type = other RNA; note = Description of Artificial Sequence: Synthetic oligonucleotide
ggagacaactcaaagtcaatt

SEQ ID NO: 22399 - RNA, 21 nt, synthetic construct
  source 1..21: mol_type = other RNA; note = Description of Artificial Sequence: Synthetic oligonucleotide
gagacaactcaaagtcatatt

SEQ ID NO: 22400 - RNA, 21 nt, synthetic construct
  source 1..21: mol_type = other RNA; note = Description of Artificial Sequence: Synthetic oligonucleotide
agacaactcaaagtcatcatt

SEQ ID NO: 22401 - RNA, 21 nt, synthetic construct
  source 1..21: mol_type = other RNA; note = Description of Artificial Sequence: Synthetic oligonucleotide
gacaactcaaagtcatccatt

SEQ ID NO: 22402 - RNA, 21 nt, synthetic construct
  source 1..21: mol_type = other RNA; note = Description of Artificial Sequence: Synthetic oligonucleotide
acaactcaaagtcatcccatt

SEQ ID NO: 22403 - RNA, 21 nt, synthetic construct
  source 1..21: mol_type = other RNA; note = Description of Artificial Sequence: Synthetic oligonucleotide
caactcaaagtcatcccaatt

SEQ ID NO: 22404 - RNA, 21 nt, synthetic construct
  source 1..21: mol_type = other RNA; note = Description of Artificial Sequence: Synthetic oligonucleotide
aactcaaagtcatcccatatt

SEQ ID NO: 22405 - RNA, 21 nt, synthetic construct
  source 1..21: mol_type = other RNA; note = Description of Artificial Sequence: Synthetic oligonucleotide
actcaaagtcatcccattatt

SEQ ID NO: 22406 - RNA, 21 nt, synthetic construct
  source 1..21: mol_type = other RNA; note = Description of Artificial Sequence: Synthetic oligonucleotide
ctcaaagtcatcccattaatt

SEQ ID NO: 22407 - RNA, 21 nt, synthetic construct
  source 1..21: mol_type = other RNA; note = Description of Artificial Sequence: Synthetic oligonucleotide
tcaaagtcatcccattaaatt

SEQ ID NO: 22408 - RNA, 21 nt, synthetic construct
  source 1..21: mol_type = other RNA; note = Description of Artificial Sequence: Synthetic oligonucleotide
caaagtcatcccattaagatt

SEQ ID NO: 22409 - RNA, 21 nt, synthetic construct
  source 1..21: mol_type = other RNA; note = Description of Artificial Sequence: Synthetic oligonucleotide
aaagtcatcccattaagtatt

SEQ ID NO: 22410 - RNA, 21 nt, synthetic construct
  source 1..21: mol_type = other RNA; note = Description of Artificial Sequence: Synthetic oligonucleotide
aagtcatcccattaagtgatt

SEQ ID NO: 22411 - RNA, 21 nt, synthetic construct
  source 1..21: mol_type = other RNA; note = Description of Artificial Sequence: Synthetic oligonucleotide
agtcatcccattaagtgcatt

SEQ ID NO: 22412 - RNA, 21 nt, synthetic construct
  source 1..21: mol_type = other RNA; note = Description of Artificial Sequence: Synthetic oligonucleotide
gtcatcccattaagtgcaatt

SEQ ID NO: 22413 - RNA, 21 nt, synthetic construct
  source 1..21: mol_type = other RNA; note = Description of Artificial Sequence: Synthetic oligonucleotide
tcatcccattaagtgcagatt

SEQ ID NO: 22414 - RNA, 21 nt, synthetic construct
  source 1..21: mol_type = other RNA; note = Description of Artificial Sequence: Synthetic oligonucleotide
catcccattaagtgcagtatt

SEQ ID NO: 22415 - RNA, 21 nt, synthetic construct
  source 1..21: mol_type = other RNA; note = Description of Artificial Sequence: Synthetic oligonucleotide
atcccattaagtgcagttatt

SEQ ID NO: 22416 - RNA, 21 nt, synthetic construct
  source 1..21: mol_type = other RNA; note = Description of Artificial Sequence: Synthetic oligonucleotide
tcccattaagtgcagtttatt

SEQ ID NO: 22417 - RNA, 21 nt, synthetic construct
  source 1..21: mol_type = other RNA; note = Description of Artificial Sequence: Synthetic oligonucleotide
cccattaagtgcagtttcatt

SEQ ID NO: 22418 - RNA, 21 nt, synthetic construct
  source 1..21: mol_type = other RNA; note = Description of Artificial Sequence: Synthetic oligonucleotide
ccattaagtgcagtttctatt

SEQ ID NO: 22419 - RNA, 21 nt, synthetic construct
  source 1..21: mol_type = other RNA; note = Description of Artificial Sequence: Synthetic oligonucleotide
cattaagtgcagtttcttatt

SEQ ID NO: 22420 - RNA, 21 nt, synthetic construct
  source 1..21: mol_type = other RNA; note = Description of Artificial Sequence: Synthetic oligonucleotide
attaagtgcagtttctttatt

SEQ ID NO: 22421 - RNA, 21 nt, synthetic construct
  source 1..21: mol_type = other RNA; note = Description of Artificial Sequence: Synthetic oligonucleotide
ttaagtgcagtttctttgatt

SEQ ID NO: 22422 - RNA, 21 nt, synthetic construct
  source 1..21: mol_type = other RNA; note = Description of Artificial Sequence: Synthetic oligonucleotide
taagtgcagtttctttgaatt

SEQ ID NO: 22423 - RNA, 21 nt, synthetic construct
  source 1..21: mol_type = other RNA; note = Description of Artificial Sequence: Synthetic oligonucleotide
aagtgcagtttctttgaaatt

SEQ ID NO: 22424 - RNA, 21 nt, synthetic construct
  source 1..21: mol_type = other RNA; note = Description of Artificial Sequence: Synthetic oligonucleotide
agtgcagtttctttgaatatt

SEQ ID NO: 22425 - RNA, 21 nt, synthetic construct
  source 1..21: mol_type = other RNA; note = Description of Artificial Sequence: Synthetic oligonucleotide
gtgcagtttctttgaatcatt

SEQ ID NO: 22426 - RNA, 21 nt, synthetic construct
  source 1..21: mol_type = other RNA; note = Description of Artificial Sequence: Synthetic oligonucleotide
tgcagtttctttgaatctatt

SEQ ID NO: 22427 - RNA, 21 nt, synthetic construct
  source 1..21: mol_type = other RNA; note = Description of Artificial Sequence: Synthetic oligonucleotide
gcagtttctttgaatcttatt

SEQ ID NO: 22428 - RNA, 21 nt, synthetic construct
  source 1..21: mol_type = other RNA; note = Description of Artificial Sequence: Synthetic oligonucleotide
cagtttctttgaatcttcatt

SEQ ID NO: 22429 - RNA, 21 nt, synthetic construct
  source 1..21: mol_type = other RNA; note = Description of Artificial Sequence: Synthetic oligonucleotide
agtttctttgaatcttctatt

SEQ ID NO: 22430 - RNA, 21 nt, synthetic construct
  source 1..21: mol_type = other RNA; note = Description of Artificial Sequence: Synthetic oligonucleotide
gtttctttgaatcttctgatt

SEQ ID NO: 22431 - RNA, 21 nt, synthetic construct
  source 1..21: mol_type = other RNA; note = Description of Artificial Sequence: Synthetic oligonucleotide
tttctttgaatcttctgcatt

SEQ ID NO: 22432 - RNA, 21 nt, synthetic construct
  source 1..21: mol_type = other RNA; note = Description of Artificial Sequence: Synthetic oligonucleotide
ttctttgaatcttctgctatt

SEQ ID NO: 22433 - RNA, 21 nt, synthetic construct
  source 1..21: mol_type = other RNA; note = Description of Artificial Sequence: Synthetic oligonucleotide
tctttgaatcttctgcttatt

SEQ ID NO: 22434 - RNA, 21 nt, synthetic construct
  source 1..21: mol_type = other RNA; note = Description of Artificial Sequence: Synthetic oligonucleotide
ctttgaatcttctgctttatt

SEQ ID NO: 22435 - RNA, 21 nt, synthetic construct
  source 1..21: mol_type = other RNA; note = Description of Artificial Sequence: Synthetic oligonucleotide
tttgaatcttctgctttaatt

SEQ ID NO: 22436 - RNA, 21 nt, synthetic construct
  source 1..21: mol_type = other RNA; note = Description of Artificial Sequence: Synthetic oligonucleotide
ttgaatcttctgctttatatt

SEQ ID NO: 22437 - RNA, 21 nt, synthetic construct
  source 1..21: mol_type = other RNA; note = Description of Artificial Sequence: Synthetic oligonucleotide
tgaatcttctgctttatcatt

SEQ ID NO: 22438 - RNA, 21 nt, synthetic construct
  source 1..21: mol_type = other RNA; note = Description of Artificial Sequence: Synthetic oligonucleotide
gaatcttctgctttatctatt

SEQ ID NO: 22439 - RNA, 21 nt, synthetic construct
  source 1..21: mol_type = other RNA; note = Description of Artificial Sequence: Synthetic oligonucleotide
aatcttctgctttatcttatt

SEQ ID NO: 22440 - RNA, 21 nt, synthetic construct
  source 1..21: mol_type = other RNA; note = Description of Artificial Sequence: Synthetic oligonucleotide
atcttctgctttatctttatt

SEQ ID NO: 22441 - RNA, 21 nt, synthetic construct
  source 1..21: mol_type = other RNA; note = Description of Artificial Sequence: Synthetic oligonucleotide
tcttctgctttatctttaatt

SEQ ID NO: 22442 - RNA, 21 nt, synthetic construct
  source 1..21: mol_type = other RNA; note = Description of Artificial Sequence: Synthetic oligonucleotide
cttctgctttatctttaaatt

SEQ ID NO: 22443 - RNA, 21 nt, synthetic construct
  source 1..21: mol_type = other RNA; note = Description of Artificial Sequence: Synthetic oligonucleotide
ttctgctttatctttaaaatt

SEQ ID NO: 22444 - RNA, 21 nt, synthetic construct
  source 1..21: mol_type = other RNA; note = Description of Artificial Sequence: Synthetic oligonucleotide
tctgctttatctttaaaaatt

SEQ ID NO: 22445 - RNA, 21 nt, synthetic construct
  source 1..21: mol_type = other RNA; note = Description of Artificial Sequence: Synthetic oligonucleotide
ctgctttatctttaaaaaatt

SEQ ID NO: 22446 - RNA, 21 nt, synthetic construct
  source 1..21: mol_type = other RNA; note = Description of Artificial Sequence: Synthetic oligonucleotide
tgctttatctttaaaaatatt

SEQ ID NO: 22447 - RNA, 21 nt, synthetic construct
  source 1..21: mol_type = other RNA; note = Description of Artificial Sequence: Synthetic oligonucleotide
gctttatctttaaaaattatt

SEQ ID NO: 22448 - RNA, 21 nt, synthetic construct
  source 1..21: mol_type = other RNA; note = Description of Artificial Sequence: Synthetic oligonucleotide
ctttatctttaaaaatttatt

SEQ ID NO: 22449 - RNA, 21 nt, synthetic construct
  source 1..21: mol_type = other RNA; note = Description of Artificial Sequence: Synthetic oligonucleotide
tttatctttaaaaatttgatt

SEQ ID NO: 22450 - RNA, 21 nt, synthetic construct
  source 1..21: mol_type = other RNA; note = Description of Artificial Sequence: Synthetic oligonucleotide
ttatctttaaaaatttgtatt

SEQ ID NO: 22451 - RNA, 21 nt, synthetic construct
  source 1..21: mol_type = other RNA; note = Description of Artificial Sequence: Synthetic oligonucleotide
tatctttaaaaatttgtaatt

SEQ ID NO: 22452 - RNA, 21 nt, synthetic construct
  source 1..21: mol_type = other RNA; note = Description of Artificial Sequence: Synthetic oligonucleotide
atctttaaaaatttgtatatt

SEQ ID NO: 22453 - RNA, 21 nt, synthetic construct
  source 1..21: mol_type = other RNA; note = Description of Artificial Sequence: Synthetic oligonucleotide
tctttaaaaatttgtataatt

SEQ ID NO: 22454 - RNA, 21 nt, synthetic construct
  source 1..21: mol_type = other RNA; note = Description of Artificial Sequence: Synthetic oligonucleotide
ctttaaaaatttgtataaatt

SEQ ID NO: 22455 - RNA, 21 nt, synthetic construct
  source 1..21: mol_type = other RNA; note = Description of Artificial Sequence: Synthetic oligonucleotide
tttaaaaatttgtataatatt

SEQ ID NO: 22456 - RNA, 21 nt, synthetic construct
  source 1..21: mol_type = other RNA; note = Description of Artificial Sequence: Synthetic oligonucleotide
ttaaaaatttgtataattatt

SEQ ID NO: 22457 - RNA, 21 nt, synthetic construct
  source 1..21: mol_type = other RNA; note = Description of Artificial Sequence: Synthetic oligonucleotide
taaaaatttgtataatttatt

SEQ ID NO: 22458 - RNA, 21 nt, synthetic construct
  source 1..21: mol_type = other RNA; note = Description of Artificial Sequence: Synthetic oligonucleotide
aaaaatttgtataatttaatt

SEQ ID NO: 22459 - RNA, 21 nt, synthetic construct
  source 1..21: mol_type = other RNA; note = Description of Artificial Sequence: Synthetic oligonucleotide
aaaatttgtataatttatatt

SEQ ID NO: 22460 - RNA, 21 nt, synthetic construct
  source 1..21: mol_type = other RNA; note = Description of Artificial Sequence: Synthetic oligonucleotide
aaatttgtataatttataatt

SEQ ID NO: 22461 - RNA, 21 nt, synthetic construct
  source 1..21: mol_type = other RNA; note = Description of Artificial Sequence: Synthetic oligonucleotide
aatttgtataatttatatatt

SEQ ID NO: 22462 - RNA, 21 nt, synthetic construct
  source 1..21: mol_type = other RNA; note = Description of Artificial Sequence: Synthetic oligonucleotide
atttgtataatttatataatt

SEQ ID NO: 22463 - RNA, 21 nt, synthetic construct
  source 1..21: mol_type = other RNA; note = Description of Artificial Sequence: Synthetic oligonucleotide
tttgtataatttatatatatt

SEQ ID NO: 22464 - RNA, 21 nt, synthetic construct
  source 1..21: mol_type = other RNA; note = Description of Artificial Sequence: Synthetic oligonucleotide
ttgtataatttatatattatt

SEQ ID NO: 22465 - RNA, 21 nt, synthetic construct
  source 1..21: mol_type = other RNA; note = Description of Artificial Sequence: Synthetic oligonucleotide
tgtataatttatatatttatt

SEQ ID NO: 22466 - RNA, 21 nt, synthetic construct
  source 1..21: mol_type = other RNA; note = Description of Artificial Sequence: Synthetic oligonucleotide
gtataatttatatattttatt

SEQ ID NO: 22467 - RNA, 21 nt, synthetic construct
  source 1..21: mol_type = other RNA; note = Description of Artificial Sequence: Synthetic oligonucleotide
tataatttatatattttaatt

SEQ ID NO: 22468 - RNA, 21 nt, synthetic construct
  source 1..21: mol_type = other RNA; note = Description of Artificial Sequence: Synthetic oligonucleotide
ataatttatatattttatatt

SEQ ID NO: 22469 - RNA, 21 nt, synthetic construct
  source 1..21: mol_type = other RNA; note = Description of Artificial Sequence: Synthetic oligonucleotide
taatttatatattttattatt

SEQ ID NO: 22470 - RNA, 21 nt, synthetic construct
  source 1..21: mol_type = other RNA; note = Description of Artificial Sequence: Synthetic oligonucleotide
aatttatatattttattcatt

SEQ ID NO: 22471 - RNA, 21 nt, synthetic construct
  source 1..21: mol_type = other RNA; note = Description of Artificial Sequence: Synthetic oligonucleotide
atttatatattttattctatt

SEQ ID NO: 22472 - RNA, 21 nt, synthetic construct
  source 1..21: mol_type = other RNA; note = Description of Artificial Sequence: Synthetic oligonucleotide
tttatatattttattctaatt

SEQ ID NO: 22473 - RNA, 21 nt, synthetic construct
  source 1..21: mol_type = other RNA; note = Description of Artificial Sequence: Synthetic oligonucleotide
ttatatattttattctatatt

SEQ ID NO: 22474 - RNA, 21 nt, synthetic construct
  source 1..21: mol_type = other RNA; note = Description of Artificial Sequence: Synthetic oligonucleotide
tatatattttattctatgatt

SEQ ID NO: 22475 - RNA, 21 nt, synthetic construct
  source 1..21: mol_type = other RNA; note = Description of Artificial Sequence: Synthetic oligonucleotide
atatattttattctatgtatt

SEQ ID NO: 22476 - RNA, 21 nt, synthetic construct
  source 1..21: mol_type = other RNA; note = Description of Artificial Sequence: Synthetic oligonucleotide
tatattttattctatgtgatt

SEQ ID NO: 22477 - RNA, 21 nt, synthetic construct
  source 1..21: mol_type = other RNA; note = Description of Artificial Sequence: Synthetic oligonucleotide
atattttattctatgtgtatt

SEQ ID NO: 22478 - RNA, 21 nt, synthetic construct
  source 1..21: mol_type = other RNA; note = Description of Artificial Sequence: Synthetic oligonucleotide
tattttattctatgtgttatt

SEQ ID NO: 22479 - RNA, 21 nt, synthetic construct
  source 1..21: mol_type = other RNA; note = Description of Artificial Sequence: Synthetic oligonucleotide
attttattctatgtgttcatt

SEQ ID NO: 22480 - RNA, 21 nt, synthetic construct
  source 1..21: mol_type = other RNA; note = Description of Artificial Sequence: Synthetic oligonucleotide
ttttattctatgtgttccatt

SEQ ID NO: 22481 - RNA, 21 nt, synthetic construct
  source 1..21: mol_type = other RNA; note = Description of Artificial Sequence: Synthetic oligonucleotide
tttattctatgtgttccaatt

SEQ ID NO: 22482 - RNA, 21 nt, synthetic construct
  source 1..21: mol_type = other RNA; note = Description of Artificial Sequence: Synthetic oligonucleotide
ttattctatgtgttccatatt

SEQ ID NO: 22483 - RNA, 21 nt, synthetic construct
  source 1..21: mol_type = other RNA; note = Description of Artificial Sequence: Synthetic oligonucleotide
tattctatgtgttccataatt

SEQ ID NO: 22484 - RNA, 21 nt, synthetic construct
  source 1..21: mol_type = other RNA; note = Description of Artificial Sequence: Synthetic oligonucleotide
attctatgtgttccatagatt

SEQ ID NO: 22485 - RNA, 21 nt, synthetic construct
  source 1..21: mol_type = other RNA; note = Description of Artificial Sequence: Synthetic oligonucleotide
ttctatgtgttccatagaatt

SEQ ID NO: 22486 - RNA, 21 nt, synthetic construct
  source 1..21: mol_type = other RNA; note = Description of Artificial Sequence: Synthetic oligonucleotide
tctatgtgttccatagatatt

SEQ ID NO: 22487 - RNA, 21 nt, synthetic construct
  source 1..21: mol_type = other RNA; note = Description of Artificial Sequence: Synthetic oligonucleotide
ctatgtgttccatagataatt

SEQ ID NO: 22488 - RNA, 21 nt, synthetic construct
  source 1..21: mol_type = other RNA; note = Description of Artificial Sequence: Synthetic oligonucleotide
tatgtgttccatagatatatt

SEQ ID NO: 22489 - RNA, 21 nt, synthetic construct
  source 1..21: mol_type = other RNA; note = Description of Artificial Sequence: Synthetic oligonucleotide
atgtgttccatagatatcatt

SEQ ID NO: 22490 - RNA, 21 nt, synthetic construct
  source 1..21: mol_type = other RNA; note = Description of Artificial Sequence: Synthetic oligonucleotide
tgtgttccatagatatctatt

SEQ ID NO: 22491 - RNA, 21 nt, synthetic construct
  source 1..21: mol_type = other RNA; note = Description of Artificial Sequence: Synthetic oligonucleotide
gtgttccatagatatcttatt

SEQ ID NO: 22492 - RNA, 21 nt, synthetic construct
  source 1..21: mol_type = other RNA; note = Description of Artificial Sequence: Synthetic oligonucleotide
tgttccatagatatcttaatt

SEQ ID NO: 22493 - RNA, 21 nt, synthetic construct
  source 1..21: mol_type = other RNA; note = Description of Artificial Sequence: Synthetic oligonucleotide
gttccatagatatcttaaatt

SEQ ID NO: 22494 - RNA, 21 nt, synthetic construct
  source 1..21: mol_type = other RNA; note = Description of Artificial Sequence: Synthetic oligonucleotide
ttccatagatatcttaatatt

SEQ ID NO: 22495 - RNA, 21 nt, synthetic construct
  source 1..21: mol_type = other RNA; note = Description of Artificial Sequence: Synthetic oligonucleotide
tccatagatatcttaatgatt

SEQ ID NO: 22496 - RNA, 21 nt, synthetic construct
  source 1..21: mol_type = other RNA; note = Description of Artificial Sequence: Synthetic oligonucleotide
ccatagatatcttaatgtatt

SEQ ID NO: 22497 - RNA, 21 nt, synthetic construct
  source 1..21: mol_type = other RNA; note = Description of Artificial Sequence: Synthetic oligonucleotide
catagatatcttaatgtaatt

SEQ ID NO: 22498 - RNA, 21 nt, synthetic construct
  source 1..21: mol_type = other RNA; note = Description of Artificial Sequence: Synthetic oligonucleotide
atagatatcttaatgtaaatt

SEQ ID NO: 22499 - RNA, 21 nt, synthetic construct
  source 1..21: mol_type = other RNA; note = Description of Artificial Sequence: Synthetic oligonucleotide
tagatatcttaatgtaaaatt

SEQ ID NO: 22500 - RNA, 21 nt, synthetic construct
  source 1..21: mol_type = other RNA; note = Description of Artificial Sequence: Synthetic oligonucleotide
agatatcttaatgtaaaaatt

SEQ ID NO: 22501 - RNA, 21 nt, synthetic construct
  source 1..21: mol_type = other RNA; note = Description of Artificial Sequence: Synthetic oligonucleotide
gatatcttaatgtaaaatatt

SEQ ID NO: 22502 - RNA, 21 nt, synthetic construct
  source 1..21: mol_type = other RNA; note = Description of Artificial Sequence: Synthetic oligonucleotide
atatcttaatgtaaaattatt

SEQ ID NO: 22503 - RNA, 21 nt, synthetic construct
  source 1..21: mol_type = other RNA; note = Description of Artificial Sequence: Synthetic oligonucleotide
tatcttaatgtaaaattaatt

SEQ ID NO: 22504 - RNA, 21 nt, synthetic construct
  source 1..21: mol_type = other RNA; note = Description of Artificial Sequence: Synthetic oligonucleotide
atcttaatgtaaaattagatt

SEQ ID NO: 22505 - RNA, 21 nt, synthetic construct
  source 1..21: mol_type = other RNA; note = Description of Artificial Sequence: Synthetic oligonucleotide
tcttaatgtaaaattagtatt

SEQ ID NO: 22506 - RNA, 21 nt, synthetic construct
  source 1..21: mol_type = other RNA; note = Description of Artificial Sequence: Synthetic oligonucleotide
cttaatgtaaaattagtcatt

SEQ ID NO: 22507 - RNA, 21 nt, synthetic construct
  source 1..21: mol_type = other RNA; note = Description of Artificial Sequence: Synthetic oligonucleotide
ttaatgtaaaattagtcaatt

SEQ ID NO: 22508 - RNA, 21 nt, synthetic construct
  source 1..21: mol_type = other RNA; note = Description of Artificial Sequence: Synthetic oligonucleotide
taatgtaaaattagtcatatt

SEQ ID NO: 22509 - RNA, 21 nt, synthetic construct
  source 1..21: mol_type = other RNA; note = Description of Artificial Sequence: Synthetic oligonucleotide
aatgtaaaattagtcattatt

SEQ ID NO: 22510 - RNA, 21 nt, synthetic construct
  source 1..21: mol_type = other RNA; note = Description of Artificial Sequence: Synthetic oligonucleotide
atgtaaaattagtcatttatt

SEQ ID NO: 22511 - RNA, 21 nt, synthetic construct
  source 1..21: mol_type = other RNA; note = Description of Artificial Sequence: Synthetic oligonucleotide
tgtaaaattagtcatttaatt

SEQ ID NO: 22512 - RNA, 21 nt, synthetic construct
  source 1..21: mol_type = other RNA; note = Description of Artificial Sequence: Synthetic oligonucleotide
gtaaaattagtcatttaaatt

SEQ ID NO: 22513 - RNA, 21 nt, synthetic construct
  source 1..21: mol_type = other RNA; note = Description of Artificial Sequence: Synthetic oligonucleotide
taaaattagtcatttaaaatt

SEQ ID NO: 22514 - RNA, 21 nt, synthetic construct
  source 1..21: mol_type = other RNA; note = Description of Artificial Sequence: Synthetic oligonucleotide
aaaattagtcatttaaatatt

SEQ ID NO: 22515 - RNA, 21 nt, synthetic construct
  source 1..21: mol_type = other RNA; note = Description of Artificial Sequence: Synthetic oligonucleotide
aaattagtcatttaaattatt

SEQ ID NO: 22516 - RNA, 21 nt, synthetic construct
  source 1..21: mol_type = other RNA; note = Description of Artificial Sequence: Synthetic oligonucleotide
aattagtcatttaaattaatt

SEQ ID NO: 22517 - RNA, 21 nt, synthetic construct
  source 1..21: mol_type = other RNA; note = Description of Artificial Sequence: Synthetic oligonucleotide
attagtcatttaaattacatt

SEQ ID NO: 22518 - RNA, 21 nt, synthetic construct
  source 1..21: mol_type = other RNA; note = Description of Artificial Sequence: Synthetic oligonucleotide
ttagtcatttaaattacaatt

SEQ ID NO: 22519 - RNA, 21 nt, synthetic construct
  source 1..21: mol_type = other RNA; note = Description of Artificial Sequence: Synthetic oligonucleotide
tagtcatttaaattacacatt

SEQ ID NO: 22520 - RNA, 21 nt, synthetic construct
  source 1..21: mol_type = other RNA; note = Description of Artificial Sequence: Synthetic oligonucleotide
agtcatttaaattacactatt

SEQ ID NO: 22521 - RNA, 21 nt, synthetic construct
  source 1..21: mol_type = other RNA; note = Description of Artificial Sequence: Synthetic oligonucleotide
gtcatttaaattacactgatt

SEQ ID NO: 22522 - RNA, 21 nt, synthetic construct
  source 1..21: mol_type = other RNA; note = Description of Artificial Sequence: Synthetic oligonucleotide
tcatttaaattacactgtatt

SEQ ID NO: 22523 - RNA, 21 nt, synthetic construct
  source 1..21: mol_type = other RNA; note = Description of Artificial Sequence: Synthetic oligonucleotide
catttaaattacactgtcatt

SEQ ID NO: 22524 - RNA, 21 nt, synthetic construct
  source 1..21: mol_type = other RNA; note = Description of Artificial Sequence: Synthetic oligonucleotide
atttaaattacactgtcaatt

SEQ ID NO: 22525 - RNA, 21 nt, synthetic construct
  source 1..21: mol_type = other RNA; note = Description of Artificial Sequence: Synthetic oligonucleotide
tttaaattacactgtcaaatt

SEQ ID NO: 22526 - RNA, 21 nt, synthetic construct
  source 1..21: mol_type = other RNA; note = Description of Artificial Sequence: Synthetic oligonucleotide
ttaaattacactgtcaatatt

SEQ ID NO: 22527 - RNA, 21 nt, synthetic construct
  source 1..21: mol_type = other RNA; note = Description of Artificial Sequence: Synthetic oligonucleotide
taaattacactgtcaattatt

SEQ ID NO: 22528 - RNA, 21 nt, synthetic construct
  source 1..21: mol_type = other RNA; note = Description of Artificial Sequence: Synthetic oligonucleotide
aaattacactgtcaattaatt

SEQ ID NO: 22529 - RNA, 21 nt, synthetic construct
  source 1..21: mol_type = other RNA; note = Description of Artificial Sequence: Synthetic oligonucleotide
aattacactgtcaattaaatt

SEQ ID NO: 22530 - RNA, 21 nt, synthetic construct
  source 1..21: mol_type = other RNA; note = Description of Artificial Sequence: Synthetic oligonucleotide
attacactgtcaattaaaatt

SEQ ID NO: 22531 - RNA, 21 nt, synthetic construct
  source 1..21: mol_type = other RNA; note = Description of Artificial Sequence: Synthetic oligonucleotide
ttacactgtcaattaaaaatt

SEQ ID NO: 22532 - RNA, 21 nt, synthetic construct
  source 1..21: mol_type = other RNA; note = Description of Artificial Sequence: Synthetic oligonucleotide
tacactgtcaattaaaagatt

SEQ ID NO: 22533 - RNA, 21 nt, synthetic construct
  source 1..21: mol_type = other RNA; note = Description of Artificial Sequence: Synthetic oligonucleotide
acactgtcaattaaaagtatt

SEQ ID NO: 22534 - RNA, 21 nt, synthetic construct
  source 1..21: mol_type = other RNA; note = Description of Artificial Sequence: Synthetic oligonucleotide
cactgtcaattaaaagtaatt

SEQ ID NO: 22535 - RNA, 21 nt, synthetic construct
  source 1..21: mol_type = other RNA; note = Description of Artificial Sequence: Synthetic oligonucleotide
actgtcaattaaaagtaaatt

SEQ ID NO: 22536 - RNA, 21 nt, synthetic construct
  source 1..21: mol_type = other RNA; note = Description of Artificial Sequence: Synthetic oligonucleotide
ctgtcaattaaaagtaatatt

SEQ ID NO: 22537 - RNA, 21 nt, synthetic construct
  source 1..21: mol_type = other RNA; note = Description of Artificial Sequence: Synthetic oligonucleotide
tgtcaattaaaagtaatgatt

SEQ ID NO: 22538 - RNA, 21 nt, synthetic construct
  source 1..21: mol_type = other RNA; note = Description of Artificial Sequence: Synthetic oligonucleotide
gtcaattaaaagtaatggatt

SEQ ID NO: 22539 - RNA, 21 nt, synthetic construct
  source 1..21: mol_type = other RNA; note = Description of Artificial Sequence: Synthetic oligonucleotide
tcaattaaaagtaatgggatt

SEQ ID NO: 22540 - RNA, 21 nt, synthetic construct
  source 1..21: mol_type = other RNA; note = Description of Artificial Sequence: Synthetic oligonucleotide
caattaaaagtaatgggcatt

SEQ ID NO: 22541 - RNA, 21 nt, synthetic construct
  source 1..21: mol_type = other RNA; note = Description of Artificial Sequence: Synthetic oligonucleotide
aattaaaagtaatgggcaatt

SEQ ID NO: 22542 - RNA, 21 nt, synthetic construct
  source 1..21: mol_type = other RNA; note = Description of Artificial Sequence: Synthetic oligonucleotide
attaaaagtaatgggcaaatt

SEQ ID NO: 22543 - RNA, 21 nt, synthetic construct
  source 1..21: mol_type = other RNA; note = Description of Artificial Sequence: Synthetic oligonucleotide
ttaaaagtaatgggcaagatt

SEQ ID NO: 22544 - RNA, 21 nt, synthetic construct
  source 1..21: mol_type = other RNA; note = Description of Artificial Sequence: Synthetic oligonucleotide
taaaagtaatgggcaagaatt

SEQ ID NO: 22545 - RNA, 21 nt, synthetic construct
  source 1..21: mol_type = other RNA; note = Description of Artificial Sequence: Synthetic oligonucleotide
aaaagtaatgggcaagagatt

SEQ ID NO: 22546 - RNA, 21 nt, synthetic construct
  source 1..21: mol_type = other RNA; note = Description of Artificial Sequence: Synthetic oligonucleotide
aaagtaatgggcaagagaatt

SEQ ID NO: 22547 - RNA, 21 nt, synthetic construct
  source 1..21: mol_type = other RNA; note = Description of Artificial Sequence: Synthetic oligonucleotide
aagtaatgggcaagagatatt

SEQ ID NO: 22548 - RNA, 21 nt, synthetic construct
  source 1..21: mol_type = other RNA; note = Description of Artificial Sequence: Synthetic oligonucleotide
agtaatgggcaagagattatt

SEQ ID NO: 22549 - RNA, 21 nt, synthetic construct
  source 1..21: mol_type = other RNA; note = Description of Artificial Sequence: Synthetic oligonucleotide
gtaatgggcaagagattgatt

SEQ ID NO: 22550 - RNA, 21 nt, synthetic construct
  source 1..21: mol_type = other RNA; note = Description of Artificial Sequence: Synthetic oligonucleotide
taatgggcaagagattgcatt

SEQ ID NO: 22551 - RNA, 21 nt, synthetic construct
  source 1..21: mol_type = other RNA; note = Description of Artificial Sequence: Synthetic oligonucleotide
aatgggcaagagattgcaatt

SEQ ID NO: 22552 - RNA, 21 nt, synthetic construct
  source 1..21: mol_type = other RNA; note = Description of Artificial Sequence: Synthetic oligonucleotide
atgggcaagagattgcatatt

SEQ ID NO: 22553 - RNA, 21 nt, synthetic construct
  source 1..21: mol_type = other RNA; note = Description of Artificial Sequence: Synthetic oligonucleotide
tgggcaagagattgcatcatt

SEQ ID NO: 22554 - RNA, 21 nt, synthetic construct
  source 1..21: mol_type = other RNA; note = Description of Artificial Sequence: Synthetic oligonucleotide
gggcaagagattgcatcaatt

SEQ ID NO: 22555 - RNA, 21 nt, synthetic construct
  source 1..21: mol_type = other RNA; note = Description of Artificial Sequence: Synthetic oligonucleotide
ggcaagagattgcatcatatt

SEQ ID NO: 22556 - RNA, 21 nt, synthetic construct
  source 1..21: mol_type = other RNA; note = Description of Artificial Sequence: Synthetic oligonucleotide
gcaagagattgcatcataatt

SEQ ID NO: 22557 - RNA, 21 nt, synthetic construct
  source 1..21: mol_type = other RNA; note = Description of Artificial Sequence: Synthetic oligonucleotide
caagagattgcatcatacatt

SEQ ID NO: 22558 - RNA, 21 nt, synthetic construct
  source 1..21: mol_type = other RNA; note = Description of Artificial Sequence: Synthetic oligonucleotide
aagagattgcatcatactatt

SEQ ID NO: 22559 - RNA, 21 nt, synthetic construct
  source 1..21: mol_type = other RNA; note = Description of Artificial Sequence: Synthetic oligonucleotide
agagattgcatcatactaatt

SEQ ID NO: 22560 - RNA, 21 nt, synthetic construct
  source 1..21: mol_type = other RNA; note = Description of Artificial Sequence: Synthetic oligonucleotide
gagattgcatcatactaaatt

SEQ ID NO: 22561 - RNA, 21 nt, synthetic construct
  source 1..21: mol_type = other RNA; note = Description of Artificial Sequence: Synthetic oligonucleotide
agattgcatcatactaatatt

SEQ ID NO: 22562 - RNA, 21 nt, synthetic construct
  source 1..21: mol_type = other RNA; note = Description of Artificial Sequence: Synthetic oligonucleotide
gattgcatcatactaattatt

SEQ ID NO: 22563 - RNA, 21 nt, synthetic construct
  source 1..21: mol_type = other RNA; note = Description of Artificial Sequence: Synthetic oligonucleotide
attgcatcatactaatttatt

SEQ ID NO: 22564 - RNA, 21 nt, synthetic construct
  source 1..21: mol_type = other RNA; note = Description of Artificial Sequence: Synthetic oligonucleotide
ttgcatcatactaatttaatt

SEQ ID NO: 22565 - RNA, 21 nt, synthetic construct
  source 1..21: mol_type = other RNA; note = Description of Artificial Sequence: Synthetic oligonucleotide
tgcatcatactaatttagatt

SEQ ID NO: 22566 - RNA, 21 nt, synthetic construct
  source 1..21: mol_type = other RNA; note = Description of Artificial Sequence: Synthetic oligonucleotide
gcatcatactaatttagtatt

SEQ ID NO: 22567 - RNA, 21 nt, synthetic construct
  source 1..21: mol_type = other RNA; note = Description of Artificial Sequence: Synthetic oligonucleotide
catcatactaatttagtaatt

SEQ ID NO: 22568 - RNA, 21 nt, synthetic construct
  source 1..21: mol_type = other RNA; note = Description of Artificial Sequence: Synthetic oligonucleotide
atcatactaatttagtaaatt

SEQ ID NO: 22569 - RNA, 21 nt, synthetic construct
  source 1..21: mol_type = other RNA; note = Description of Artificial Sequence: Synthetic oligonucleotide
tcatactaatttagtaagatt

SEQ ID NO: 22570 - RNA, 21 nt, synthetic construct
  source 1..21: mol_type = other RNA; note = Description of Artificial Sequence: Synthetic oligonucleotide
catactaatttagtaagaatt

SEQ ID NO: 22571 - RNA, 21 nt, synthetic construct
  source 1..21: mol_type = other RNA; note = Description of Artificial Sequence: Synthetic oligonucleotide
atactaatttagtaagaaatt

SEQ ID NO: 22572 - RNA, 21 nt, synthetic construct
  source 1..21: mol_type = other RNA; note = Description of Artificial Sequence: Synthetic oligonucleotide
tactaatttagtaagaacatt

SEQ ID NO: 22573 - RNA, 21 nt, synthetic construct
  source 1..21: mol_type = other RNA; note = Description of Artificial Sequence: Synthetic oligonucleotide
actaatttagtaagaacgatt

SEQ ID NO: 22574 - RNA, 21 nt, synthetic construct
  source 1..21: mol_type = other RNA; note = Description of Artificial Sequence: Synthetic oligonucleotide
ctaatttagtaagaacgtatt

SEQ ID NO: 22575 - RNA, 21 nt, synthetic construct
  source 1..21: mol_type = other RNA; note = Description of Artificial Sequence: Synthetic oligonucleotide
taatttagtaagaacgttatt

SEQ ID NO: 22576 - RNA, 21 nt, synthetic construct
  source 1..21: mol_type = other RNA; note = Description of Artificial Sequence: Synthetic oligonucleotide
aatttagtaagaacgttcatt

SEQ ID NO: 22577 - RNA, 21 nt, synthetic construct
  source 1..21: mol_type = other RNA; note = Description of Artificial Sequence: Synthetic oligonucleotide
atttagtaagaacgttccatt

SEQ ID NO: 22578 - RNA, 21 nt, synthetic construct
  source 1..21: mol_type = other RNA; note = Description of Artificial Sequence: Synthetic oligonucleotide
tttagtaagaacgttcccatt

SEQ ID NO: 22579 - RNA, 21 nt, synthetic construct
  source 1..21: mol_type = other RNA; note = Description of Artificial Sequence: Synthetic oligonucleotide
ttagtaagaacgttcccaatt

SEQ ID NO: 22580 - RNA, 21 nt, synthetic construct
  source 1..21: mol_type = other RNA; note = Description of Artificial Sequence: Synthetic oligonucleotide
tagtaagaacgttcccaaatt

SEQ ID NO: 22581 - RNA, 21 nt, synthetic construct
  source 1..21: mol_type = other RNA; note = Description of Artificial Sequence: Synthetic oligonucleotide
agtaagaacgttcccaaaatt

SEQ ID NO: 22582 - RNA, 21 nt, synthetic construct
  source 1..21: mol_type = other RNA; note = Description of Artificial Sequence: Synthetic oligonucleotide
gtaagaacgttcccaaatatt

SEQ ID NO: 22583 - RNA, 21 nt, synthetic construct
  source 1..21: mol_type = other RNA; note = Description of Artificial Sequence: Synthetic oligonucleotide
taagaacgttcccaaatgatt

SEQ ID NO: 22584 - RNA, 21 nt, synthetic construct
  source 1..21: mol_type = other RNA; note = Description of Artificial Sequence: Synthetic oligonucleotide
aagaacgttcccaaatgtatt

SEQ ID NO: 22585 - RNA, 21 nt, synthetic construct
  source 1..21: mol_type = other RNA; note = Description of Artificial Sequence: Synthetic oligonucleotide
agaacgttcccaaatgttatt

SEQ ID NO: 22586 - RNA, 21 nt, synthetic construct
  source 1..21: mol_type = other RNA; note = Description of Artificial Sequence: Synthetic oligonucleotide
gaacgttcccaaatgttgatt

SEQ ID NO: 22587 - RNA, 21 nt, synthetic construct
  source 1..21: mol_type = other RNA; note = Description of Artificial Sequence: Synthetic oligonucleotide
aacgttcccaaatgttgtatt

SEQ ID NO: 22588 - RNA, 21 nt, synthetic construct
  source 1..21: mol_type = other RNA; note = Description of Artificial Sequence: Synthetic oligonucleotide
acgttcccaaatgttgtaatt

SEQ ID NO: 22589 - RNA, 21 nt, synthetic construct
  source 1..21: mol_type = other RNA; note = Description of Artificial Sequence: Synthetic oligonucleotide
cgttcccaaatgttgtaaatt

SEQ ID NO: 22590 - RNA, 21 nt, synthetic construct
  source 1..21: mol_type = other RNA; note = Description of Artificial Sequence: Synthetic oligonucleotide
gttcccaaatgttgtaacatt

SEQ ID NO: 22591 - RNA, 21 nt, synthetic construct
  source 1..21: mol_type = other RNA; note = Description of Artificial Sequence: Synthetic oligonucleotide
ttcccaaatgttgtaacaatt

SEQ ID NO: 22592 - RNA, 21 nt, synthetic construct
  source 1..21: mol_type = other RNA; note = Description of Artificial Sequence: Synthetic oligonucleotide
tcccaaatgttgtaacaaatt

SEQ ID NO: 22593 - RNA, 21 nt, synthetic construct
  source 1..21: mol_type = other RNA; note = Description of Artificial Sequence: Synthetic oligonucleotide
cccaaatgttgtaacaatatt

SEQ ID NO: 22594 - RNA, 21 nt, synthetic construct
  source 1..21: mol_type = other RNA; note = Description of Artificial Sequence: Synthetic oligonucleotide
ccaaatgttgtaacaatgatt

SEQ ID NO: 22595 - RNA, 21 nt, synthetic construct
  source 1..21: mol_type = other RNA; note = Description of Artificial Sequence: Synthetic oligonucleotide
caaatgttgtaacaatgtatt

SEQ ID NO: 22596 - RNA, 21 nt, synthetic construct
  source 1..21: mol_type = other RNA; note = Description of Artificial Sequence: Synthetic oligonucleotide
aaatgttgtaacaatgtgatt

SEQ ID NO: 22597 - RNA, 21 nt, synthetic construct
  source 1..21: mol_type = other RNA; note = Description of Artificial Sequence: Synthetic oligonucleotide
aatgttgtaacaatgtggatt

SEQ ID NO: 22598 - RNA, 21 nt, synthetic construct
  source 1..21: mol_type = other RNA; note = Description of Artificial Sequence: Synthetic oligonucleotide
atgttgtaacaatgtggaatt

SEQ ID NO: 22599 - RNA, 21 nt, synthetic construct
  source 1..21: mol_type = other RNA; note = Description of Artificial Sequence: Synthetic oligonucleotide
tgttgtaacaatgtggatatt

SEQ ID NO: 22600 - RNA, 21 nt, synthetic construct
  source 1..21: mol_type = other RNA; note = Description of Artificial Sequence: Synthetic oligonucleotide
gttgtaacaatgtggatcatt

SEQ ID NO: 22601 - RNA, 21 nt, synthetic construct
  source 1..21: mol_type = other RNA; note = Description of Artificial Sequence: Synthetic oligonucleotide
ttgtaacaatgtggatcaatt

SEQ ID NO: 22602 - RNA, 21 nt, synthetic construct
  source 1..21: mol_type = other RNA; note = Description of Artificial Sequence: Synthetic oligonucleotide
tgtaacaatgtggatcatatt

SEQ ID NO: 22603 - RNA, 21 nt, synthetic construct
  source 1..21: mol_type = other RNA; note = Description of Artificial Sequence: Synthetic oligonucleotide
gtaacaatgtggatcataatt

SEQ ID NO: 22604 - RNA, 21 nt, synthetic construct
  source 1..21: mol_type = other RNA; note = Description of Artificial Sequence: Synthetic oligonucleotide
taacaatgtggatcatacatt

SEQ ID NO: 22605 - RNA, 21 nt, synthetic construct
  source 1..21: mol_type = other RNA; note = Description of Artificial Sequence: Synthetic oligonucleotide
aacaatgtggatcatacaatt

SEQ ID NO: 22606 - RNA, 21 nt, synthetic construct
  source 1..21: mol_type = other RNA; note = Description of Artificial Sequence: Synthetic oligonucleotide
acaatgtggatcatacatatt

SEQ ID NO: 22607 - RNA, 21 nt, synthetic construct
  source 1..21: mol_type = other RNA; note = Description of Artificial Sequence: Synthetic oligonucleotide
caatgtggatcatacatcatt

SEQ ID NO: 22608 - RNA, 21 nt, synthetic construct
  source 1..21: mol_type = other RNA; note = Description of Artificial Sequence: Synthetic oligonucleotide
aatgtggatcatacatctatt

SEQ ID NO: 22609 - RNA, 21 nt, synthetic construct
  source 1..21: mol_type = other RNA; note = Description of Artificial Sequence: Synthetic oligonucleotide
atgtggatcatacatctcatt

SEQ ID NO: 22610 - RNA, 21 nt, synthetic construct
  source 1..21: mol_type = other RNA; note = Description of Artificial Sequence: Synthetic oligonucleotide
tgtggatcatacatctctatt

SEQ ID NO: 22611 - RNA, 21 nt, synthetic construct
  source 1..21: mol_type = other RNA; note = Description of Artificial Sequence: Synthetic oligonucleotide
gtggatcatacatctctgatt

SEQ ID NO: 22612 - RNA, 21 nt, synthetic construct
  source 1..21: mol_type = other RNA; note = Description of Artificial Sequence: Synthetic oligonucleotide
tggatcatacatctctggatt

SEQ ID NO: 22613 - RNA, 21 nt, synthetic construct
  source 1..21: mol_type = other RNA; note = Description of Artificial Sequence: Synthetic oligonucleotide
ggatcatacatctctggtatt

SEQ ID NO: 22614 - RNA, 21 nt, synthetic construct
  source 1..21: mol_type = other RNA; note = Description of Artificial Sequence: Synthetic oligonucleotide
gatcatacatctctggttatt

SEQ ID NO: 22615 - RNA, 21 nt, synthetic construct
  source 1..21: mol_type = other RNA; note = Description of Artificial Sequence: Synthetic oligonucleotide
atcatacatctctggtttatt

SEQ ID NO: 22616 - RNA, 21 nt, synthetic construct
  source 1..21: mol_type = other RNA; note = Description of Artificial Sequence: Synthetic oligonucleotide
tcatacatctctggttttatt

SEQ ID NO: 22617 - RNA, 21 nt, synthetic construct
  source 1..21: mol_type = other RNA; note = Description of Artificial Sequence: Synthetic oligonucleotide
catacatctctggtttttatt

SEQ ID NO: 22618 - RNA, 21 nt, synthetic construct
  source 1..21: mol_type = other RNA; note = Description of Artificial Sequence: Synthetic oligonucleotide
atacatctctggttttttatt

SEQ ID NO: 22619 - RNA, 21 nt, synthetic construct
  source 1..21: mol_type = other RNA; note = Description of Artificial Sequence: Synthetic oligonucleotide
tacatctctggttttttaatt

SEQ ID NO: 22620 - RNA, 21 nt, synthetic construct
  source 1..21: mol_type = other RNA; note = Description of Artificial Sequence: Synthetic oligonucleotide
acatctctggttttttaaatt

SEQ ID NO: 22621 - RNA, 21 nt, synthetic construct
  source 1..21: mol_type = other RNA; note = Description of Artificial Sequence: Synthetic oligonucleotide
catctctggttttttaaaatt

SEQ ID NO: 22622 - RNA, 21 nt, synthetic construct
  source 1..21: mol_type = other RNA; note = Description of Artificial Sequence: Synthetic oligonucleotide
atctctggttttttaaatatt

SEQ ID NO: 22623 - RNA, 21 nt, synthetic construct
  source 1..21: mol_type = other RNA; note = Description of Artificial Sequence: Synthetic oligonucleotide
tctctggttttttaaatgatt

SEQ ID NO: 22624 - RNA, 21 nt, synthetic construct
  source 1..21: mol_type = other RNA; note = Description of Artificial Sequence: Synthetic oligonucleotide
ctctggttttttaaatgtatt

SEQ ID NO: 22625 - RNA, 21 nt, synthetic construct
  source 1..21: mol_type = other RNA; note = Description of Artificial Sequence: Synthetic oligonucleotide
tctggttttttaaatgtaatt

SEQ ID NO: 22626 - RNA, 21 nt, synthetic construct
  source 1..21: mol_type = other RNA; note = Description of Artificial Sequence: Synthetic oligonucleotide
ctggttttttaaatgtatatt

SEQ ID NO: 22627 - RNA, 21 nt, synthetic construct
  source 1..21: mol_type = other RNA; note = Description of Artificial Sequence: Synthetic oligonucleotide
tggttttttaaatgtattatt

SEQ ID NO: 22628 - RNA, 21 nt, synthetic construct
  source 1..21: mol_type = other RNA; note = Description of Artificial Sequence: Synthetic oligonucleotide
ggttttttaaatgtattgatt

SEQ ID NO: 22629 - RNA, 21 nt, synthetic construct
  source 1..21: mol_type = other RNA; note = Description of Artificial Sequence: Synthetic oligonucleotide
gttttttaaatgtattgaatt

SEQ ID NO: 22630 - RNA, 21 nt, synthetic construct
  source 1..21: mol_type = other RNA; note = Description of Artificial Sequence: Synthetic oligonucleotide
ttttttaaatgtattgagatt

SEQ ID NO: 22631 - RNA, 21 nt, synthetic construct
  source 1..21: mol_type = other RNA; note = Description of Artificial Sequence: Synthetic oligonucleotide
tttttaaatgtattgaggatt

SEQ ID NO: 22632 - RNA, 21 nt, synthetic construct
  source 1..21: mol_type = other RNA; note = Description of Artificial Sequence: Synthetic oligonucleotide
ttttaaatgtattgaggcatt

SEQ ID NO: 22633 - RNA, 21 nt, synthetic construct
  source 1..21: mol_type = other RNA; note = Description of Artificial Sequence: Synthetic oligonucleotide
tttaaatgtattgaggctatt

SEQ ID NO: 22634 - RNA, 21 nt, synthetic construct
  source 1..21: mol_type = other RNA; note = Description of Artificial Sequence: Synthetic oligonucleotide
ttaaatgtattgaggcttatt

SEQ ID NO: 22635 - RNA, 21 nt, synthetic construct
  source 1..21: mol_type = other RNA; note = Description of Artificial Sequence: Synthetic oligonucleotide
taaatgtattgaggctttatt

SEQ ID NO: 22636 - RNA, 21 nt, synthetic construct
  source 1..21: mol_type = other RNA; note = Description of Artificial Sequence: Synthetic oligonucleotide
aaatgtattgaggctttcatt

SEQ ID NO: 22637 - RNA, 21 nt, synthetic construct
  source 1..21: mol_type = other RNA; note = Description of Artificial Sequence: Synthetic oligonucleotide
aatgtattgaggctttctatt

SEQ ID NO: 22638 - RNA, 21 nt, synthetic construct
  source 1..21: mol_type = other RNA; note = Description of Artificial Sequence: Synthetic oligonucleotide
atgtattgaggctttcttatt

SEQ ID NO: 22639 - RNA, 21 nt, synthetic construct
  source 1..21: mol_type = other RNA; note = Description of Artificial Sequence: Synthetic oligonucleotide
tgtattgaggctttcttgatt

SEQ ID NO: 22640 - RNA, 21 nt, synthetic construct
  source 1..21: mol_type = other RNA; note = Description of Artificial Sequence: Synthetic oligonucleotide
gtattgaggctttcttggatt

SEQ ID NO: 22641 - RNA, 21 nt, synthetic construct
  source 1..21: mol_type = other RNA; note = Description of Artificial Sequence: Synthetic oligonucleotide
tattgaggctttcttggtatt

SEQ ID NO: 22642 - RNA, 21 nt, synthetic construct
  source 1..21: mol_type = other RNA; note = Description of Artificial Sequence: Synthetic oligonucleotide
attgaggctttcttggtgatt

SEQ ID NO: 22643 - RNA, 21 nt, synthetic construct
  source 1..21: mol_type = other RNA; note = Description of Artificial Sequence: Synthetic oligonucleotide
ttgaggctttcttggtggatt

SEQ ID NO: 22644 - RNA, 21 nt, synthetic construct
  source 1..21: mol_type = other RNA; note = Description of Artificial Sequence: Synthetic oligonucleotide
tgaggctttcttggtggaatt

SEQ ID NO: 22645 - RNA, 21 nt, synthetic construct
  source 1..21: mol_type = other RNA; note = Description of Artificial Sequence: Synthetic oligonucleotide
gaggctttcttggtggacatt

SEQ ID NO: 22646 - RNA, 21 nt, synthetic construct
  source 1..21: mol_type = other RNA; note = Description of Artificial Sequence: Synthetic oligonucleotide
aggctttcttggtggactatt

SEQ ID NO: 22647 - RNA, 21 nt, synthetic construct
  source 1..21: mol_type = other RNA; note = Description of Artificial Sequence: Synthetic oligonucleotide
ggctttcttggtggactaatt

SEQ ID NO: 22648 - RNA, 21 nt, synthetic construct
  source 1..21: mol_type = other RNA; note = Description of Artificial Sequence: Synthetic oligonucleotide
gctttcttggtggactagatt

SEQ ID NO: 22649 - RNA, 21 nt, synthetic construct
  source 1..21: mol_type = other RNA; note = Description of Artificial Sequence: Synthetic oligonucleotide
ctttcttggtggactagtatt

SEQ ID NO: 22650 - RNA, 21 nt, synthetic construct
  source 1..21: mol_type = other RNA; note = Description of Artificial Sequence: Synthetic oligonucleotide
tttcttggtggactagtaatt

SEQ ID NO: 22651 - RNA, 21 nt, synthetic construct
  source 1..21: mol_type = other RNA; note = Description of Artificial Sequence: Synthetic oligonucleotide
ttcttggtggactagtatatt

SEQ ID NO: 22652 - RNA, 21 nt, synthetic construct
  source 1..21: mol_type = other RNA; note = Description of Artificial Sequence: Synthetic oligonucleotide
tcttggtggactagtataatt

SEQ ID NO: 22653 - RNA, 21 nt, synthetic construct
  source 1..21: mol_type = other RNA; note = Description of Artificial Sequence: Synthetic oligonucleotide
cttggtggactagtatagatt

SEQ ID NO: 22654 - RNA, 21 nt, synthetic construct
  source 1..21: mol_type = other RNA; note = Description of Artificial Sequence: Synthetic oligonucleotide
ttggtggactagtatagtatt

SEQ ID NO: 22655 - RNA, 21 nt, synthetic construct
  source 1..21: mol_type = other RNA; note = Description of Artificial Sequence: Synthetic oligonucleotide
tggtggactagtatagtaatt

SEQ ID NO: 22656 - RNA, 21 nt, synthetic construct
  source 1..21: mol_type = other RNA; note = Description of Artificial Sequence: Synthetic oligonucleotide
ggtggactagtatagtatatt

SEQ ID NO: 22657 - RNA, 21 nt, synthetic construct
  source 1..21: mol_type = other RNA; note = Description of Artificial Sequence: Synthetic oligonucleotide
gtggactagtatagtataatt

SEQ ID NO: 22658 - RNA, 21 nt, synthetic construct
  source 1..21: mol_type = other RNA; note = Description of Artificial Sequence: Synthetic oligonucleotide
tggactagtatagtatacatt

SEQ ID NO: 22659 - RNA, 21 nt, synthetic construct
  source 1..21: mol_type = other RNA; note = Description of Artificial Sequence: Synthetic oligonucleotide
ggactagtatagtatacgatt

SEQ ID NO: 22660 - RNA, 21 nt, synthetic construct
  source 1..21: mol_type = other RNA; note = Description of Artificial Sequence: Synthetic oligonucleotide
gactagtatagtatacggatt

SEQ ID NO: 22661 - RNA, 21 nt, synthetic construct
  source 1..21: mol_type = other RNA; note = Description of Artificial Sequence: Synthetic oligonucleotide
actagtatagtatacggtatt

SEQ ID NO: 22662 - RNA, 21 nt, synthetic construct
  source 1..21: mol_type = other RNA; note = Description of Artificial Sequence: Synthetic oligonucleotide
ctagtatagtatacggtcatt

SEQ ID NO: 22663 - RNA, 21 nt, synthetic construct
  source 1..21: mol_type = other RNA; note = Description of Artificial Sequence: Synthetic oligonucleotide
tagtatagtatacggtcaatt

SEQ ID NO: 22664 - RNA, 21 nt, synthetic construct
  source 1..21: mol_type = other RNA; note = Description of Artificial Sequence: Synthetic oligonucleotide
agtatagtatacggtcagatt

SEQ ID NO: 22665 - RNA, 21 nt, synthetic construct
  source 1..21: mol_type = other RNA; note = Description of Artificial Sequence: Synthetic oligonucleotide
gtatagtatacggtcagtatt

SEQ ID NO: 22666 - RNA, 21 nt, synthetic construct
  source 1..21: mol_type = other RNA; note = Description of Artificial Sequence: Synthetic oligonucleotide
tatagtatacggtcagttatt

SEQ ID NO: 22667 - RNA, 21 nt, synthetic construct
  source 1..21: mol_type = other RNA; note = Description of Artificial Sequence: Synthetic oligonucleotide
atagtatacggtcagttaatt

SEQ ID NO: 22668 - RNA, 21 nt, synthetic construct
  source 1..21: mol_type = other RNA; note = Description of Artificial Sequence: Synthetic oligonucleotide
tagtatacggtcagttatatt

SEQ ID NO: 22669 - RNA, 21 nt, synthetic construct
  source 1..21: mol_type = other RNA; note = Description of Artificial Sequence: Synthetic oligonucleotide
agtatacggtcagttatgatt

SEQ ID NO: 22670 - RNA, 21 nt, synthetic construct
  source 1..21: mol_type = other RNA; note = Description of Artificial Sequence: Synthetic oligonucleotide
gtatacggtcagttatgtatt

SEQ ID NO: 22671 - RNA, 21 nt, synthetic construct
  source 1..21: mol_type = other RNA; note = Description of Artificial Sequence: Synthetic oligonucleotide
tatacggtcagttatgtcatt

SEQ ID NO: 22672 - RNA, 21 nt, synthetic construct
  source 1..21: mol_type = other RNA; note = Description of Artificial Sequence: Synthetic oligonucleotide
atacggtcagttatgtcaatt

SEQ ID NO: 22673 - RNA, 21 nt, synthetic construct
  source 1..21: mol_type = other RNA; note = Description of Artificial Sequence: Synthetic oligonucleotide
tacggtcagttatgtcaaatt

SEQ ID NO: 22674 - RNA, 21 nt, synthetic construct
  source 1..21: mol_type = other RNA; note = Description of Artificial Sequence: Synthetic oligonucleotide
acggtcagttatgtcaatatt

SEQ ID NO: 22675 - RNA, 21 nt, synthetic construct
  source 1..21: mol_type = other RNA; note = Description of Artificial Sequence: Synthetic oligonucleotide
cggtcagttatgtcaatgatt

SEQ ID NO: 22676 - RNA, 21 nt, synthetic construct
  source 1..21: mol_type = other RNA; note = Description of Artificial Sequence: Synthetic oligonucleotide
ggtcagttatgtcaatgtatt

SEQ ID NO: 22677 - RNA, 21 nt, synthetic construct
  source 1..21: mol_type = other RNA; note = Description of Artificial Sequence: Synthetic oligonucleotide
gtcagttatgtcaatgttatt

SEQ ID NO: 22678 - RNA, 21 nt, synthetic construct
  source 1..21: mol_type = other RNA; note = Description of Artificial Sequence: Synthetic oligonucleotide
tcagttatgtcaatgtttatt

SEQ ID NO: 22679 - RNA, 21 nt, synthetic construct
  source 1..21: mol_type = other RNA; note = Description of Artificial Sequence: Synthetic oligonucleotide
cagttatgtcaatgtttcatt

SEQ ID NO: 22680 - RNA, 21 nt, synthetic construct
  source 1..21: mol_type = other RNA; note = Description of Artificial Sequence: Synthetic oligonucleotide
agttatgtcaatgtttcaatt

SEQ ID NO: 22681 - RNA, 21 nt, synthetic construct
  source 1..21: mol_type = other RNA; note = Description of Artificial Sequence: Synthetic oligonucleotide
gttatgtcaatgtttcatatt

SEQ ID NO: 22682 - RNA, 21 nt, synthetic construct
  source 1..21: mol_type = other RNA; note = Description of Artificial Sequence: Synthetic oligonucleotide
ttatgtcaatgtttcatgatt

SEQ ID NO: 22683 - RNA, 21 nt, synthetic construct
  source 1..21: mol_type = other RNA; note = Description of Artificial Sequence: Synthetic oligonucleotide
tatgtcaatgtttcatggatt

SEQ ID NO: 22684 - RNA, 21 nt, synthetic construct
  source 1..21: mol_type = other RNA; note = Description of Artificial Sequence: Synthetic oligonucleotide
atgtcaatgtttcatggtatt

SEQ ID NO: 22685 - RNA, 21 nt, synthetic construct
  source 1..21: mol_type = other RNA; note = Description of Artificial Sequence: Synthetic oligonucleotide
tgtcaatgtttcatggtcatt

SEQ ID NO: 22686 - RNA, 21 nt, synthetic construct
  source 1..21: mol_type = other RNA; note = Description of Artificial Sequence: Synthetic oligonucleotide
gtcaatgtttcatggtcaatt

SEQ ID NO: 22687 - RNA, 21 nt, synthetic construct
  source 1..21: mol_type = other RNA; note = Description of Artificial Sequence: Synthetic oligonucleotide
tcaatgtttcatggtcaaatt

SEQ ID NO: 22688 - RNA, 21 nt, synthetic construct
  source 1..21: mol_type = other RNA; note = Description of Artificial Sequence: Synthetic oligonucleotide
caatgtttcatggtcaatatt

SEQ ID NO: 22689 - RNA, 21 nt, synthetic construct
  source 1..21: mol_type = other RNA; note = Description of Artificial Sequence: Synthetic oligonucleotide
aatgtttcatggtcaataatt

SEQ ID NO: 22690 - RNA, 21 nt, synthetic construct
  source 1..21: mol_type = other RNA; note = Description of Artificial Sequence: Synthetic oligonucleotide
atgtttcatggtcaataaatt

SEQ ID NO: 22691 - RNA, 21 nt, synthetic construct
  source 1..21: mol_type = other RNA; note = Description of Artificial Sequence: Synthetic oligonucleotide
tgtttcatggtcaataaaatt

SEQ ID NO: 22692 - RNA, 21 nt, synthetic construct
  source 1..21: mol_type = other RNA; note = Description of Artificial Sequence: Synthetic oligonucleotide
gtttcatggtcaataaaaatt

SEQ ID NO: 22693 - RNA, 21 nt, synthetic construct
  source 1..21: mol_type = other RNA; note = Description of Artificial Sequence: Synthetic oligonucleotide
tttcatggtcaataaaaaatt

SEQ ID NO: 22694 - RNA, 21 nt, synthetic construct
  source 1..21: mol_type = other RNA; note = Description of Artificial Sequence: Synthetic oligonucleotide
ttcatggtcaataaaaagatt

SEQ ID NO: 22695 - RNA, 21 nt, synthetic construct
  source 1..21: mol_type = other RNA; note = Description of Artificial Sequence: Synthetic oligonucleotide
tcatggtcaataaaaaggatt

SEQ ID NO: 22696 - RNA, 21 nt, synthetic construct
  source 1..21: mol_type = other RNA; note = Description of Artificial Sequence: Synthetic oligonucleotide
catggtcaataaaaaggaatt

SEQ ID NO: 22697 - RNA, 21 nt, synthetic construct
  source 1..21: mol_type = other RNA; note = Description of Artificial Sequence: Synthetic oligonucleotide
atggtcaataaaaaggaaatt

SEQ ID NO: 22698 - RNA, 21 nt, synthetic construct
  source 1..21: mol_type = other RNA; note = Description of Artificial Sequence: Synthetic oligonucleotide
tggtcaataaaaaggaagatt

SEQ ID NO: 22699 - RNA, 21 nt, synthetic construct
  source 1..21: mol_type = other RNA; note = Description of Artificial Sequence: Synthetic oligonucleotide
ggtcaataaaaaggaagtatt

SEQ ID NO: 22700 - RNA, 21 nt, synthetic construct
  source 1..21: mol_type = other RNA; note = Description of Artificial Sequence: Synthetic oligonucleotide
gtcaataaaaaggaagttatt

SEQ ID NO: 22701 - RNA, 21 nt, synthetic construct
  source 1..21: mol_type = other RNA; note = Description of Artificial Sequence: Synthetic oligonucleotide
tcaataaaaaggaagttgatt

SEQ ID NO: 22702 - RNA, 21 nt, synthetic construct
  source 1..21: mol_type = other RNA; note = Description of Artificial Sequence: Synthetic oligonucleotide
caataaaaaggaagttgcatt

SEQ ID NO: 22703 - RNA, 21 nt, synthetic construct
  source 1..21: mol_type = other RNA; note = Description of Artificial Sequence: Synthetic oligonucleotide
aataaaaaggaagttgcaatt

SEQ ID NO: 22704 - RNA, 21 nt, synthetic construct
  source 1..21: mol_type = other RNA; note = Description of Artificial Sequence: Synthetic oligonucleotide
ataaaaaggaagttgcaaatt

SEQ ID NO: 22705 - RNA, 21 nt, synthetic construct
  source 1..21: mol_type = other RNA; note = Description of Artificial Sequence: Synthetic oligonucleotide
taaaaaggaagttgcaaaatt

SEQ ID NO: 22706 - RNA, 21 nt, synthetic construct
  source 1..21: mol_type = other RNA; note = Description of Artificial Sequence: Synthetic oligonucleotide
aaaaaggaagttgcaaatatt

SEQ ID NO: 22707 - RNA, 21 nt, synthetic construct
  source 1..21: mol_type = other RNA; note = Description of Artificial Sequence: Synthetic oligonucleotide
aaaaggaagttgcaaattatt

SEQ ID NO: 22708 - RNA, 21 nt, synthetic construct
  source 1..21: mol_type = other RNA; note = Description of Artificial Sequence: Synthetic oligonucleotide
aaaggaagttgcaaattgatt

SEQ ID NO: 22709 - RNA, 21 nt, synthetic construct
  source 1..21: mol_type = other RNA; note = Description of Artificial Sequence: Synthetic oligonucleotide
aaggaagttgcaaattgtatt

SEQ ID NO: 22710 - RNA, 21 nt, synthetic construct
  source 1..21: mol_type = other RNA; note = Description of Artificial Sequence: Synthetic oligonucleotide
aggaagttgcaaattgtgatt

SEQ ID NO: 22711 - RNA, 21 nt, synthetic construct
  source 1..21: mol_type = other RNA; note = Description of Artificial Sequence: Synthetic oligonucleotide
accctcgccacgcccctgctc

SEQ ID NO: 22712 - RNA, 21 nt, synthetic construct
  source 1..21: mol_type = other RNA; note = Description of Artificial Sequence: Synthetic oligonucleotide
ccctcgccacgcccctgctcc

SEQ ID NO: 22713 - RNA, 21 nt, synthetic construct
  source 1..21: mol_type = other RNA; note = Description of Artificial Sequence: Synthetic oligonucleotide
cctcgccacgcccctgctccc

SEQ ID NO: 22714 - RNA, 21 nt, synthetic construct
  source 1..21: mol_type = other RNA; note = Description of Artificial Sequence: Synthetic oligonucleotide
ctcgccacgcccctgctcccc

SEQ ID NO: 22715 - RNA, 21 nt, synthetic construct
  source 1..21: mol_type = other RNA; note = Description of Artificial Sequence: Synthetic oligonucleotide
tcgccacgcccctgctccccc

SEQ ID NO: 22716 - RNA, 21 nt, synthetic construct
  source 1..21: mol_type = other RNA; note = Description of Artificial Sequence: Synthetic oligonucleotide
cgccacgcccctgctcccccg

SEQ ID NO: 22717 - RNA, 21 nt, synthetic construct
  source 1..21: mol_type = other RNA; note = Description of Artificial Sequence: Synthetic oligonucleotide
gccacgcccctgctcccccgc

SEQ ID NO: 22718 - RNA, 21 nt, synthetic construct
  source 1..21: mol_type = other RNA; note = Description of Artificial Sequence: Synthetic oligonucleotide
ccacgcccctgctcccccgcg

SEQ ID NO: 22719 - RNA, 21 nt, synthetic construct
  source 1..21: mol_type = other RNA; note = Description of Artificial Sequence: Synthetic oligonucleotide
cacgcccctgctcccccgcgg

SEQ ID NO: 22720 - RNA, 21 nt, synthetic construct
  source 1..21: mol_type = other RNA; note = Description of Artificial Sequence: Synthetic oligonucleotide
acgcccctgctcccccgcggt

SEQ ID NO: 22721 - RNA, 21 nt, synthetic construct
  source 1..21: mol_type = other RNA; note = Description of Artificial Sequence: Synthetic oligonucleotide
cgcccctgctcccccgcggtt

SEQ ID NO: 22722 - RNA, 21 nt, synthetic construct
  source 1..21: mol_type = other RNA; note = Description of Artificial Sequence: Synthetic oligonucleotide
gcccctgctcccccgcggttg

SEQ ID NO: 22723 - RNA, 21 nt, synthetic construct
  source 1..21: mol_type = other RNA; note = Description of Artificial Sequence: Synthetic oligonucleotide
cccctgctcccccgcggttgg

SEQ ID NO: 22724 - RNA, 21 nt, synthetic construct
  source 1..21: mol_type = other RNA; note = Description of Artificial Sequence: Synthetic oligonucleotide
ccctgctcccccgcggttggt

SEQ ID NO: 22725 - RNA, 21 nt, synthetic construct
  source 1..21: mol_type = other RNA; note = Description of Artificial Sequence: Synthetic oligonucleotide
cctgctcccccgcggttggtt

SEQ ID NO: 22726 - RNA, 21 nt, synthetic construct
  source 1..21: mol_type = other RNA; note = Description of Artificial Sequence: Synthetic oligonucleotide
ctgctcccccgcggttggttc

SEQ ID NO: 22727 - RNA, 21 nt, synthetic construct
  source 1..21: mol_type = other RNA; note = Description of Artificial Sequence: Synthetic oligonucleotide
tgctcccccgcggttggttct

SEQ ID NO: 22728 - RNA, 21 nt, synthetic construct
  source 1..21: mol_type = other RNA; note = Description of Artificial Sequence: Synthetic oligonucleotide
gctcccccgcggttggttctt

SEQ ID NO: 22729 - RNA, 21 nt, synthetic construct
  source 1..21: mol_type = other RNA; note = Description of Artificial Sequence: Synthetic oligonucleotide
ctcccccgcggttggttcttc

SEQ ID NO: 22730 - RNA, 21 nt, synthetic construct
  source 1..21: mol_type = other RNA; note = Description of Artificial Sequence: Synthetic oligonucleotide
tcccccgcggttggttcttcc

SEQ ID NO: 22731 - RNA, 21 nt, synthetic construct
  source 1..21: mol_type = other RNA; note = Description of Artificial Sequence: Synthetic oligonucleotide
cccccgcggttggttcttcct

SEQ ID NO: 22732 - RNA, 21 nt, synthetic construct
  source 1..21: mol_type = other RNA; note = Description of Artificial Sequence: Synthetic oligonucleotide
ccccgcggttggttcttcctt

SEQ ID NO: 22733 - RNA, 21 nt, synthetic construct
  source 1..21: mol_type = other RNA; note = Description of Artificial Sequence: Synthetic oligonucleotide
cccgcggttggttcttccttg

SEQ ID NO: 22734 - RNA, 21 nt, synthetic construct
  source 1..21: mol_type = other RNA; note = Description of Artificial Sequence: Synthetic oligonucleotide
ccgcggttggttcttccttgc

SEQ ID NO: 22735 - RNA, 21 nt, synthetic construct
  source 1..21: mol_type = other RNA; note = Description of Artificial Sequence: Synthetic oligonucleotide
cgcggttggttcttccttgct

SEQ ID NO: 22736 - RNA, 21 nt, synthetic construct
  source 1..21: mol_type = other RNA; note = Description of Artificial Sequence: Synthetic oligonucleotide
gcggttggttcttccttgctc

SEQ ID NO: 22737 - RNA, 21 nt, synthetic construct
  source 1..21: mol_type = other RNA; note = Description of Artificial Sequence: Synthetic oligonucleotide
cggttggttcttccttgctct

SEQ ID NO: 22738 - RNA, 21 nt, synthetic construct
  source 1..21: mol_type = other RNA; note = Description of Artificial Sequence: Synthetic oligonucleotide
ggttggttcttccttgctcta

SEQ ID NO: 22739 - RNA, 21 nt, synthetic construct
  source 1..21: mol_type = other RNA; note = Description of Artificial Sequence: Synthetic oligonucleotide
gttggttcttccttgctctac

SEQ ID NO: 22740 - RNA, 21 nt, synthetic construct
  source 1..21: mol_type = other RNA; note = Description of Artificial Sequence: Synthetic oligonucleotide
ttggttcttccttgctctact

SEQ ID NO: 22741 - RNA, 21 nt, synthetic construct
  source 1..21: mol_type = other RNA; note = Description of Artificial Sequence: Synthetic oligonucleotide
tggttcttccttgctctactc

SEQ ID NO: 22742 - RNA, 21 nt, synthetic construct
  source 1..21: mol_type = other RNA; note = Description of Artificial Sequence: Synthetic oligonucleotide
ggttcttccttgctctactca

SEQ ID NO: 22743 - RNA, 21 nt, synthetic construct
  source 1..21: mol_type = other RNA; note = Description of Artificial Sequence: Synthetic oligonucleotide
gttcttccttgctctactcaa

SEQ ID NO: 22744 - RNA, 21 nt, synthetic construct
  source 1..21: mol_type = other RNA; note = Description of Artificial Sequence: Synthetic oligonucleotide
ttcttccttgctctactcaac

SEQ ID NO: 22745 - RNA, 21 nt, synthetic construct
  source 1..21: mol_type = other RNA; note = Description of Artificial Sequence: Synthetic oligonucleotide
tcttccttgctctactcaacc

SEQ ID NO: 22746 - RNA, 21 nt, synthetic construct
  source 1..21: mol_type = other RNA; note = Description of Artificial Sequence: Synthetic oligonucleotide
cttccttgctctactcaaccc

SEQ ID NO: 22747 - RNA, 21 nt, synthetic construct
  source 1..21: mol_type = other RNA; note = Description of Artificial Sequence: Synthetic oligonucleotide
ttccttgctctactcaaccct

SEQ ID NO: 22748 - RNA, 21 nt, synthetic construct
  source 1..21: mol_type = other RNA; note = Description of Artificial Sequence: Synthetic oligonucleotide
tccttgctctactcaaccctg

SEQ ID NO: 22749 - RNA, 21 nt, synthetic construct
  source 1..21: mol_type = other RNA; note = Description of Artificial Sequence: Synthetic oligonucleotide
ccttgctctactcaaccctga

SEQ ID NO: 22750 - RNA, 21 nt, synthetic construct
  source 1..21: mol_type = other RNA; note = Description of Artificial Sequence: Synthetic oligonucleotide
cttgctctactcaaccctgac

SEQ ID NO: 22751 - RNA, 21 nt, synthetic construct
  source 1..21: mol_type = other RNA; note = Description of Artificial Sequence: Synthetic oligonucleotide
ttgctctactcaaccctgacc

SEQ ID NO: 22752 - RNA, 21 nt, synthetic construct
  source 1..21: mol_type = other RNA; note = Description of Artificial Sequence: Synthetic oligonucleotide
tgctctactcaaccctgacct

SEQ ID NO: 22753 - RNA, 21 nt, synthetic construct
  source 1..21: mol_type = other RNA; note = Description of Artificial Sequence: Synthetic oligonucleotide
gctctactcaaccctgacctc

SEQ ID NO: 22754 - RNA, 21 nt, synthetic construct
  source 1..21: mol_type = other RNA; note = Description of Artificial Sequence: Synthetic oligonucleotide
ctctactcaaccctgacctct

SEQ ID NO: 22755 - RNA, 21 nt, synthetic construct
  source 1..21: mol_type = other RNA; note = Description of Artificial Sequence: Synthetic oligonucleotide
tctactcaaccctgacctctt

SEQ ID NO: 22756 - RNA, 21 nt, synthetic construct
  source 1..21: mol_type = other RNA; note = Description of Artificial Sequence: Synthetic oligonucleotide
ctactcaaccctgacctcttc

SEQ ID NO: 22757 - RNA, 21 nt, synthetic construct
  source 1..21: mol_type = other RNA; note = Description of Artificial Sequence: Synthetic oligonucleotide
tactcaaccctgacctcttct

SEQ ID NO: 22758 - RNA, 21 nt, synthetic construct
  source 1..21: mol_type = other RNA; note = Description of Artificial Sequence: Synthetic oligonucleotide
actcaaccctgacctcttctc

SEQ ID NO: 22759 - RNA, 21 nt, synthetic construct
  source 1..21: mol_type = other RNA; note = Description of Artificial Sequence: Synthetic oligonucleotide
ctcaaccctgacctcttctct

SEQ ID NO: 22760 - RNA, 21 nt, synthetic construct
  source 1..21: mol_type = other RNA; note = Description of Artificial Sequence: Synthetic oligonucleotide
tcaaccctgacctcttctctc

SEQ ID NO: 22761 - RNA, 21 nt, synthetic construct
  source 1..21: mol_type = other RNA; note = Description of Artificial Sequence: Synthetic oligonucleotide
caaccctgacctcttctctct

SEQ ID NO: 22762 - RNA, 21 nt, synthetic construct
  source 1..21: mol_type = other RNA; note = Description of Artificial Sequence: Synthetic oligonucleotide
aaccctgacctcttctctctg

SEQ ID NO: 22763 - RNA, 21 nt, synthetic construct
  source 1..21: mol_type = other RNA; note = Description of Artificial Sequence: Synthetic oligonucleotide
accctgacctcttctctctga

SEQ ID NO: 22764 - RNA, 21 nt, synthetic construct
  source 1..21: mol_type = other RNA; note = Description of Artificial Sequence: Synthetic oligonucleotide
ccctgacctcttctctctgac

SEQ ID NO: 22765 - RNA, 21 nt, synthetic construct
  source 1..21: mol_type = other RNA; note = Description of Artificial Sequence: Synthetic oligonucleotide
cctgacctcttctctctgact

SEQ ID NO: 22766 - RNA, 21 nt, synthetic construct
  source 1..21: mol_type = other RNA; note = Description of Artificial Sequence: Synthetic oligonucleotide
ctgacctcttctctctgactc

SEQ ID NO: 22767 - RNA, 21 nt, synthetic construct
  source 1..21: mol_type = other RNA; note = Description of Artificial Sequence: Synthetic oligonucleotide
tgacctcttctctctgactct

SEQ ID NO: 22768 - RNA, 21 nt, synthetic construct
  source 1..21: mol_type = other RNA; note = Description of Artificial Sequence: Synthetic oligonucleotide
gacctcttctctctgactctc

SEQ ID NO: 22769 - RNA, 21 nt, synthetic construct
  source 1..21: mol_type = other RNA; note = Description of Artificial Sequence: Synthetic oligonucleotide
acctcttctctctgactctcg

SEQ ID NO: 22770 - RNA, 21 nt, synthetic construct
  source 1..21: mol_type = other RNA; note = Description of Artificial Sequence: Synthetic oligonucleotide
cctcttctctctgactctcga

SEQ ID NO: 22771 - RNA, 21 nt, synthetic construct
  source 1..21: mol_type = other RNA; note = Description of Artificial Sequence: Synthetic oligonucleotide
ctcttctctctgactctcgac

SEQ ID NO: 22772 - RNA, 21 nt, synthetic construct
  source 1..21: mol_type = other RNA; note = Description of Artificial Sequence: Synthetic oligonucleotide
tcttctctctgactctcgact

SEQ ID NO: 22773 - RNA, 21 nt, synthetic construct
  source 1..21: mol_type = other RNA; note = Description of Artificial Sequence: Synthetic oligonucleotide
cttctctctgactctcgactt

SEQ ID NO: 22774 - RNA, 21 nt, synthetic construct
  source 1..21: mol_type = other RNA; note = Description of Artificial Sequence: Synthetic oligonucleotide
ttctctctgactctcgacttg

SEQ ID NO: 22775 - RNA, 21 nt, synthetic construct
  source 1..21: mol_type = other RNA; note = Description of Artificial Sequence: Synthetic oligonucleotide
tctctctgactctcgacttgt

SEQ ID NO: 22776 - RNA, 21 nt, synthetic construct
  source 1..21: mol_type = other RNA; note = Description of Artificial Sequence: Synthetic oligonucleotide
ctctctgactctcgacttgtg

SEQ ID NO: 22777 - RNA, 21 nt, synthetic construct
  source 1..21: mol_type = other RNA; note = Description of Artificial Sequence: Synthetic oligonucleotide
tctctgactctcgacttgtgt

SEQ ID NO: 22778 - RNA, 21 nt, synthetic construct
  source 1..21: mol_type = other RNA; note = Description of Artificial Sequence: Synthetic oligonucleotide
ctctgactctcgacttgtgtt

SEQ ID NO: 22779 - RNA, 21 nt, synthetic construct
  source 1..21: mol_type = other RNA; note = Description of Artificial Sequence: Synthetic oligonucleotide
tctgactctcgacttgtgttc

SEQ ID NO: 22780 - RNA, 21 nt, synthetic construct
  source 1..21: mol_type = other RNA; note = Description of Artificial Sequence: Synthetic oligonucleotide
ctgactctcgacttgtgttcc

SEQ ID NO: 22781 - RNA, 21 nt, synthetic construct
  source 1..21: mol_type = other RNA; note = Description of Artificial Sequence: Synthetic oligonucleotide
tgactctcgacttgtgttccc

SEQ ID NO: 22782 - RNA, 21 nt, synthetic construct
  source 1..21: mol_type = other RNA; note = Description of Artificial Sequence: Synthetic oligonucleotide
gactctcgacttgtgttcccc

SEQ ID NO: 22783 - RNA, 21 nt, synthetic construct
  source 1..21: mol_type = other RNA; note = Description of Artificial Sequence: Synthetic oligonucleotide
actctcgacttgtgttccccg

SEQ ID NO: 22784 - RNA, 21 nt, synthetic construct
  source 1..21: mol_type = other RNA; note = Description of Artificial Sequence: Synthetic oligonucleotide
ctctcgacttgtgttccccgc

SEQ ID NO: 22785 - RNA, 21 nt, synthetic construct
  source 1..21: mol_type = other RNA; note = Description of Artificial Sequence: Synthetic oligonucleotide
tctcgacttgtgttccccgct

SEQ ID NO: 22786 - RNA, 21 nt, synthetic construct
  source 1..21: mol_type = other RNA; note = Description of Artificial Sequence: Synthetic oligonucleotide
ctcgacttgtgttccccgctc

SEQ ID NO: 22787 - RNA, 21 nt, synthetic construct
  source 1..21: mol_type = other RNA; note = Description of Artificial Sequence: Synthetic oligonucleotide
tcgacttgtgttccccgctcc

SEQ ID NO: 22788 - RNA, 21 nt, synthetic construct
  source 1..21: mol_type = other RNA; note = Description of Artificial Sequence: Synthetic oligonucleotide
cgacttgtgttccccgctcct

SEQ ID NO: 22789 - RNA, 21 nt, synthetic construct
  source 1..21: mol_type = other RNA; note = Description of Artificial Sequence: Synthetic oligonucleotide
gacttgtgttccccgctcctc

SEQ ID NO: 22790 - RNA, 21 nt, synthetic construct
  source 1..21: mol_type = other RNA; note = Description of Artificial Sequence: Synthetic oligonucleotide
acttgtgttccccgctcctcc

SEQ ID NO: 22791 - RNA, 21 nt, synthetic construct
  source 1..21: mol_type = other RNA; note = Description of Artificial Sequence: Synthetic oligonucleotide
cttgtgttccccgctcctccc

SEQ ID NO: 22792 - RNA, 21 nt, synthetic construct
  source 1..21: mol_type = other RNA; note = Description of Artificial Sequence: Synthetic oligonucleotide
ttgtgttccccgctcctccct

SEQ ID NO: 22793 - RNA, 21 nt, synthetic construct
  source 1..21: mol_type = other RNA; note = Description of Artificial Sequence: Synthetic oligonucleotide
tgtgttccccgctcctccctg

SEQ ID NO: 22794 - RNA, 21 nt, synthetic construct
  source 1..21: mol_type = other RNA; note = Description of Artificial Sequence: Synthetic oligonucleotide
gtgttccccgctcctccctga

SEQ ID NO: 22795 - RNA, 21 nt, synthetic construct
  source 1..21: mol_type = other RNA; note = Description of Artificial Sequence: Synthetic oligonucleotide
tgttccccgctcctccctgac

SEQ ID NO: 22796 - RNA, 21 nt, synthetic construct
  source 1..21: mol_type = other RNA; note = Description of Artificial Sequence: Synthetic oligonucleotide
gttccccgctcctccctgacc

SEQ ID NO: 22797 - RNA, 21 nt, synthetic construct
  source 1..21: mol_type = other RNA; note = Description of Artificial Sequence: Synthetic oligonucleotide
ttccccgctcctccctgacct

SEQ ID NO: 22798 - RNA, 21 nt, synthetic construct
  source 1..21: mol_type = other RNA; note = Description of Artificial Sequence: Synthetic oligonucleotide
tccccgctcctccctgacctt

SEQ ID NO: 22799 - RNA, 21 nt, synthetic construct
  source 1..21: mol_type = other RNA; note = Description of Artificial Sequence: Synthetic oligonucleotide
ccccgctcctccctgaccttc

SEQ ID NO: 22800 - RNA, 21 nt, synthetic construct
  source 1..21: mol_type = other RNA; note = Description of Artificial Sequence: Synthetic oligonucleotide
cccgctcctccctgaccttcc

SEQ ID NO: 22801 - RNA, 21 nt, synthetic construct
  source 1..21: mol_type = other RNA; note = Description of Artificial Sequence: Synthetic oligonucleotide
ccgctcctccctgaccttcct

SEQ ID NO: 22802 - RNA, 21 nt, synthetic construct
  source 1..21: mol_type = other RNA; note = Description of Artificial Sequence: Synthetic oligonucleotide
cgctcctccctgaccttcctc

SEQ ID NO: 22803 - RNA, 21 nt, synthetic construct
  source 1..21: mol_type = other RNA; note = Description of Artificial Sequence: Synthetic oligonucleotide
gctcctccctgaccttcctcc

SEQ ID NO: 22804 - RNA, 21 nt, synthetic construct
  source 1..21: mol_type = other RNA; note = Description of Artificial Sequence: Synthetic oligonucleotide
ctcctccctgaccttcctccc

SEQ ID NO: 22805 - RNA, 21 nt, synthetic construct
  source 1..21: mol_type = other RNA; note = Description of Artificial Sequence: Synthetic oligonucleotide
tcctccctgaccttcctcccc

SEQ ID NO: 22806 - RNA, 21 nt, synthetic construct
  source 1..21: mol_type = other RNA; note = Description of Artificial Sequence: Synthetic oligonucleotide
cctccctgaccttcctcccct

SEQ ID NO: 22807 - RNA, 21 nt, synthetic construct
  source 1..21: mol_type = other RNA; note = Description of Artificial Sequence: Synthetic oligonucleotide
ctccctgaccttcctcccctc

SEQ ID NO: 22808 - RNA, 21 nt, synthetic construct
  source 1..21: mol_type = other RNA; note = Description of Artificial Sequence: Synthetic oligonucleotide
tccctgaccttcctcccctcc

SEQ ID NO: 22809 - RNA, 21 nt, synthetic construct
  source 1..21: mol_type = other RNA; note = Description of Artificial Sequence: Synthetic oligonucleotide
ccctgaccttcctcccctccc

SEQ ID NO: 22810 - RNA, 21 nt, synthetic construct
  source 1..21: mol_type = other RNA; note = Description of Artificial Sequence: Synthetic oligonucleotide
cctgaccttcctcccctcccc

SEQ ID NO: 22811 - RNA, 21 nt, synthetic construct
  source 1..21: mol_type = other RNA; note = Description of Artificial Sequence: Synthetic oligonucleotide
ctgaccttcctcccctcccct

SEQ ID NO: 22812 - RNA, 21 nt, synthetic construct
  source 1..21: mol_type = other RNA; note = Description of Artificial Sequence: Synthetic oligonucleotide
tgaccttcctcccctcccctt

SEQ ID NO: 22813 - RNA, 21 nt, synthetic construct
  source 1..21: mol_type = other RNA; note = Description of Artificial Sequence: Synthetic oligonucleotide
gaccttcctcccctccccttt

SEQ ID NO: 22814 - RNA, 21 nt, synthetic construct
  source 1..21: mol_type = other RNA; note = Description of Artificial Sequence: Synthetic oligonucleotide
accttcctcccctcccctttc

SEQ ID NO: 22815 - RNA, 21 nt, synthetic construct
  source 1..21: mol_type = other RNA; note = Description of Artificial Sequence: Synthetic oligonucleotide
ccttcctcccctcccctttca

SEQ ID NO: 22816 - RNA, 21 nt, synthetic construct
  source 1..21: mol_type = other RNA; note = Description of Artificial Sequence: Synthetic oligonucleotide
cttcctcccctcccctttcac

SEQ ID NO: 22817 - RNA, 21 nt, synthetic construct
  source 1..21: mol_type = other RNA; note = Description of Artificial Sequence: Synthetic oligonucleotide
ttcctcccctcccctttcact

SEQ ID NO: 22818 - RNA, 21 nt, synthetic construct
  source 1..21: mol_type = other RNA; note = Description of Artificial Sequence: Synthetic oligonucleotide
tcctcccctcccctttcactc

SEQ ID NO: 22819 - RNA, 21 nt, synthetic construct
  source 1..21: mol_type = other RNA; note = Description of Artificial Sequence: Synthetic oligonucleotide
cctcccctcccctttcactca

SEQ ID NO: 22820 - RNA, 21 nt, synthetic construct
  source 1..21: mol_type = other RNA; note = Description of Artificial Sequence: Synthetic oligonucleotide
ctcccctcccctttcactcaa

SEQ ID NO: 22821 - RNA, 21 nt, synthetic construct
  source 1..21: mol_type = other RNA; note = Description of Artificial Sequence: Synthetic oligonucleotide
tcccctcccctttcactcaat

SEQ ID NO: 22822 - RNA, 21 nt, synthetic construct
  source 1..21: mol_type = other RNA; note = Description of Artificial Sequence: Synthetic oligonucleotide
cccctcccctttcactcaatt

SEQ ID NO: 22823 - RNA, 21 nt, synthetic construct
  source 1..21: mol_type = other RNA; note = Description of Artificial Sequence: Synthetic oligonucleotide
ccctcccctttcactcaattc

SEQ ID NO: 22824 - RNA, 21 nt, synthetic construct
  source 1..21: mol_type = other RNA; note = Description of Artificial Sequence: Synthetic oligonucleotide
cctcccctttcactcaattct

SEQ ID NO: 22825 - RNA, 21 nt, synthetic construct
  source 1..21: mol_type = other RNA; note = Description of Artificial Sequence: Synthetic oligonucleotide
ctcccctttcactcaattctc

SEQ ID NO: 22826 - RNA, 21 nt, synthetic construct
  source 1..21: mol_type = other RNA; note = Description of Artificial Sequence: Synthetic oligonucleotide
tcccctttcactcaattctca

SEQ ID NO: 22827 - RNA, 21 nt, synthetic construct
  source 1..21: mol_type = other RNA; note = Description of Artificial Sequence: Synthetic oligonucleotide
cccctttcactcaattctcac

SEQ ID NO: 22828 - RNA, 21 nt, synthetic construct
  source 1..21: mol_type = other RNA; note = Description of Artificial Sequence: Synthetic oligonucleotide
ccctttcactcaattctcacc

SEQ ID NO: 22829 - RNA, 21 nt, synthetic construct
  source 1..21: mol_type = other RNA; note = Description of Artificial Sequence: Synthetic oligonucleotide
cctttcactcaattctcacca

SEQ ID NO: 22830 - RNA, 21 nt, synthetic construct
  source 1..21: mol_type = other RNA; note = Description of Artificial Sequence: Synthetic oligonucleotide
ctttcactcaattctcaccaa

SEQ ID NO: 22831 - RNA, 21 nt, synthetic construct
  source 1..21: mol_type = other RNA; note = Description of Artificial Sequence: Synthetic oligonucleotide
tttcactcaattctcaccaac

SEQ ID NO: 22832 - RNA, 21 nt, synthetic construct
  source 1..21: mol_type = other RNA; note = Description of Artificial Sequence: Synthetic oligonucleotide
ttcactcaattctcaccaact

SEQ ID NO: 22833 - RNA, 21 nt, synthetic construct
  source 1..21: mol_type = other RNA; note = Description of Artificial Sequence: Synthetic oligonucleotide
tcactcaattctcaccaactc

SEQ ID NO: 22834 - RNA, 21 nt, synthetic construct
  source 1..21: mol_type = other RNA; note = Description of Artificial Sequence: Synthetic oligonucleotide
cactcaattctcaccaactct

SEQ ID NO: 22835 - RNA, 21 nt, synthetic construct
  source 1..21: mol_type = other RNA; note = Description of Artificial Sequence: Synthetic oligonucleotide
actcaattctcaccaactctt

SEQ ID NO: 22836 - RNA, 21 nt, synthetic construct
  source 1..21: mol_type = other RNA; note = Description of Artificial Sequence: Synthetic oligonucleotide
ctcaattctcaccaactcttt

SEQ ID NO: 22837 - RNA, 21 nt, synthetic construct
  source 1..21: mol_type = other RNA; note = Description of Artificial Sequence: Synthetic oligonucleotide
tcaattctcaccaactctttc

SEQ ID NO: 22838 - RNA, 21 nt, synthetic construct
  source 1..21: mol_type = other RNA; note = Description of Artificial Sequence: Synthetic oligonucleotide
caattctcaccaactctttct

SEQ ID NO: 22839 - RNA, 21 nt, synthetic construct
  source 1..21: mol_type = other RNA; note = Description of Artificial Sequence: Synthetic oligonucleotide
aattctcaccaactctttctc

SEQ ID NO: 22840 - RNA, 21 nt, synthetic construct
  source 1..21: mol_type = other RNA; note = Description of Artificial Sequence: Synthetic oligonucleotide
attctcaccaactctttctct

SEQ ID NO: 22841 - RNA, 21 nt, synthetic construct
  source 1..21: mol_type = other RNA; note = Description of Artificial Sequence: Synthetic oligonucleotide
ttctcaccaactctttctctc

SEQ ID NO: 22842 - RNA, 21 nt, synthetic construct
  source 1..21: mol_type = other RNA; note = Description of Artificial Sequence: Synthetic oligonucleotide
tctcaccaactctttctctct

SEQ ID NO: 22843 - RNA, 21 nt, synthetic construct
  source 1..21: mol_type = other RNA; note = Description of Artificial Sequence: Synthetic oligonucleotide
ctcaccaactctttctctctc

SEQ ID NO: 22844 - RNA, 21 nt, synthetic construct
  source 1..21: mol_type = other RNA; note = Description of Artificial Sequence: Synthetic oligonucleotide
tcaccaactctttctctctct

SEQ ID NO: 22845 - RNA, 21 nt, synthetic construct
  source 1..21: mol_type = other RNA; note = Description of Artificial Sequence: Synthetic oligonucleotide
caccaactctttctctctctg

SEQ ID NO: 22846 - RNA, 21 nt, synthetic construct
  source 1..21: mol_type = other RNA; note = Description of Artificial Sequence: Synthetic oligonucleotide
accaactctttctctctctgg

SEQ ID NO: 22847 - RNA, 21 nt, synthetic construct
  source 1..21: mol_type = other RNA; note = Description of Artificial Sequence: Synthetic oligonucleotide
ccaactctttctctctctggt

SEQ ID NO: 22848 - RNA, 21 nt, synthetic construct
  source 1..21: mol_type = other RNA; note = Description of Artificial Sequence: Synthetic oligonucleotide
caactctttctctctctggtg

SEQ ID NO: 22849 - RNA, 21 nt, synthetic construct
  source 1..21: mol_type = other RNA; note = Description of Artificial Sequence: Synthetic oligonucleotide
aactctttctctctctggtgt

SEQ ID NO: 22850 - RNA, 21 nt, synthetic construct
  source 1..21: mol_type = other RNA; note = Description of Artificial Sequence: Synthetic oligonucleotide
actctttctctctctggtgtt

SEQ ID NO: 22851 - RNA, 21 nt, synthetic construct
  source 1..21: mol_type = other RNA; note = Description of Artificial Sequence: Synthetic oligonucleotide
ctctttctctctctggtgttt

SEQ ID NO: 22852 - RNA, 21 nt, synthetic construct
  source 1..21: mol_type = other RNA; note = Description of Artificial Sequence: Synthetic oligonucleotide
tctttctctctctggtgtttt

SEQ ID NO: 22853 - RNA, 21 nt, synthetic construct
  source 1..21: mol_type = other RNA; note = Description of Artificial Sequence: Synthetic oligonucleotide
ctttctctctctggtgttttc

SEQ ID NO: 22854 - RNA, 21 nt, synthetic construct
  source 1..21: mol_type = other RNA; note = Description of Artificial Sequence: Synthetic oligonucleotide
tttctctctctggtgttttct

SEQ ID NO: 22855 - RNA, 21 nt, synthetic construct
  source 1..21: mol_type = other RNA; note = Description of Artificial Sequence: Synthetic oligonucleotide
ttctctctctggtgttttctc

SEQ ID NO: 22856 - RNA, 21 nt, synthetic construct
  source 1..21: mol_type = other RNA; note = Description of Artificial Sequence: Synthetic oligonucleotide
tctctctctggtgttttctcc

SEQ ID NO: 22857 - RNA, 21 nt, synthetic construct
  source 1..21: mol_type = other RNA; note = Description of Artificial Sequence: Synthetic oligonucleotide
ctctctctggtgttttctcct

SEQ ID NO: 22858 - RNA, 21 nt, synthetic construct
  source 1..21: mol_type = other RNA; note = Description of Artificial Sequence: Synthetic oligonucleotide
tctctctggtgttttctcctt

SEQ ID NO: 22859 - RNA, 21 nt, synthetic construct
  source 1..21: mol_type = other RNA; note = Description of Artificial Sequence: Synthetic oligonucleotide
ctctctggtgttttctccttt

SEQ ID NO: 22860 - RNA, 21 nt, synthetic construct
  source 1..21: mol_type = other RNA; note = Description of Artificial Sequence: Synthetic oligonucleotide
tctctggtgttttctcctttt

SEQ ID NO: 22861 - RNA, 21 nt, synthetic construct
  source 1..21: mol_type = other RNA; note = Description of Artificial Sequence: Synthetic oligonucleotide
ctctggtgttttctccttttc

SEQ ID NO: 22862 - RNA, 21 nt, synthetic construct
  source 1..21: mol_type = other RNA; note = Description of Artificial Sequence: Synthetic oligonucleotide
tctggtgttttctccttttct

SEQ ID NO: 22863 - RNA, 21 nt, synthetic construct
  source 1..21: mol_type = other RNA; note = Description of Artificial Sequence: Synthetic oligonucleotide
ctggtgttttctccttttctc

SEQ ID NO: 22864 - RNA, 21 nt, synthetic construct
  source 1..21: mol_type = other RNA; note = Description of Artificial Sequence: Synthetic oligonucleotide
tggtgttttctccttttctcg

SEQ ID NO: 22865 - RNA, 21 nt, synthetic construct
  source 1..21: mol_type = other RNA; note = Description of Artificial Sequence: Synthetic oligonucleotide
ggtgttttctccttttctcgt

SEQ ID NO: 22866 - RNA, 21 nt, synthetic construct
  source 1..21: mol_type = other RNA; note = Description of Artificial Sequence: Synthetic oligonucleotide
gtgttttctccttttctcgta

SEQ ID NO: 22867 - RNA, 21 nt, synthetic construct
  source 1..21: mol_type = other RNA; note = Description of Artificial Sequence: Synthetic oligonucleotide
tgttttctccttttctcgtaa

SEQ ID NO: 22868 - RNA, 21 nt, synthetic construct
  source 1..21: mol_type = other RNA; note = Description of Artificial Sequence: Synthetic oligonucleotide
gttttctccttttctcgtaaa

SEQ ID NO: 22869 - RNA, 21 nt, synthetic construct
  source 1..21: mol_type = other RNA; note = Description of Artificial Sequence: Synthetic oligonucleotide
ttttctccttttctcgtaaac

SEQ ID NO: 22870 - RNA, 21 nt, synthetic construct
  source 1..21: mol_type = other RNA; note = Description of Artificial Sequence: Synthetic oligonucleotide
tttctccttttctcgtaaact

SEQ ID NO: 22871 - RNA, 21 nt, synthetic construct
  source 1..21: mol_type = other RNA; note = Description of Artificial Sequence: Synthetic oligonucleotide
ttctccttttctcgtaaactt

SEQ ID NO: 22872 - RNA, 21 nt, synthetic construct
  source 1..21: mol_type = other RNA; note = Description of Artificial Sequence: Synthetic oligonucleotide
tctccttttctcgtaaacttt

SEQ ID NO: 22873 - RNA, 21 nt, synthetic construct
  source 1..21: mol_type = other RNA; note = Description of Artificial Sequence: Synthetic oligonucleotide
ctccttttctcgtaaactttg

SEQ ID NO: 22874 - RNA, 21 nt, synthetic construct
  source 1..21: mol_type = other RNA; note = Description of Artificial Sequence: Synthetic oligonucleotide
tccttttctcgtaaactttgc

SEQ ID NO: 22875 - RNA, 21 nt, synthetic construct
  source 1..21: mol_type = other RNA; note = Description of Artificial Sequence: Synthetic oligonucleotide
ccttttctcgtaaactttgcc

SEQ ID NO: 22876 - RNA, 21 nt, synthetic construct
  source 1..21: mol_type = other RNA; note = Description of Artificial Sequence: Synthetic oligonucleotide
cttttctcgtaaactttgccg

SEQ ID NO: 22877 - RNA, 21 nt, synthetic construct
  source 1..21: mol_type = other RNA; note = Description of Artificial Sequence: Synthetic oligonucleotide
ttttctcgtaaactttgccgc

SEQ ID NO: 22878 - RNA, 21 nt, synthetic construct
  source 1..21: mol_type = other RNA; note = Description of Artificial Sequence: Synthetic oligonucleotide
tttctcgtaaactttgccgcc

SEQ ID NO: 22879 - RNA, 21 nt, synthetic construct
  source 1..21: mol_type = other RNA; note = Description of Artificial Sequence: Synthetic oligonucleotide
ttctcgtaaactttgccgcct

SEQ ID NO: 22880 - RNA, 21 nt, synthetic construct
  source 1..21: mol_type = other RNA; note = Description of Artificial Sequence: Synthetic oligonucleotide
tctcgtaaactttgccgccta

SEQ ID NO: 22881 - RNA, 21 nt, synthetic construct
  source 1..21: mol_type = other RNA; note = Description of Artificial Sequence: Synthetic oligonucleotide
ctcgtaaactttgccgcctat

SEQ ID NO: 22882 - RNA, 21 nt, synthetic construct
  source 1..21: mol_type = other RNA; note = Description of Artificial Sequence: Synthetic oligonucleotide
tcgtaaactttgccgcctatg

SEQ ID NO: 22883 - RNA, 21 nt, synthetic construct
  source 1..21: mol_type = other RNA; note = Description of Artificial Sequence: Synthetic oligonucleotide
cgtaaactttgccgcctatga

SEQ ID NO: 22884 - RNA, 21 nt, synthetic construct
  source 1..21: mol_type = other RNA; note = Description of Artificial Sequence: Synthetic oligonucleotide
gtaaactttgccgcctatgag

SEQ ID NO: 22885 - RNA, 21 nt, synthetic construct
  source 1..21: mol_type = other RNA; note = Description of Artificial Sequence: Synthetic oligonucleotide
taaactttgccgcctatgagc

SEQ ID NO: 22886 - RNA, 21 nt, synthetic construct
  source 1..21: mol_type = other RNA; note = Description of Artificial Sequence: Synthetic oligonucleotide
aaactttgccgcctatgagca

SEQ ID NO: 22887 - RNA, 21 nt, synthetic construct
  source 1..21: mol_type = other RNA; note = Description of Artificial Sequence: Synthetic oligonucleotide
aactttgccgcctatgagcag

SEQ ID NO: 22888 - RNA, 21 nt, synthetic construct
  source 1..21: mol_type = other RNA; note = Description of Artificial Sequence: Synthetic oligonucleotide
actttgccgcctatgagcagc

SEQ ID NO: 22889 - RNA, 21 nt, synthetic construct
  source 1..21: mol_type = other RNA; note = Description of Artificial Sequence: Synthetic oligonucleotide
ctttgccgcctatgagcagcc

SEQ ID NO: 22890 - RNA, 21 nt, synthetic construct
  source 1..21: mol_type = other RNA; note = Description of Artificial Sequence: Synthetic oligonucleotide
tttgccgcctatgagcagcca

SEQ ID NO: 22891 - RNA, 21 nt, synthetic construct
  source 1..21: mol_type = other RNA; note = Description of Artificial Sequence: Synthetic oligonucleotide
ttgccgcctatgagcagccac

SEQ ID NO: 22892 - RNA, 21 nt, synthetic construct
  source 1..21: mol_type = other RNA; note = Description of Artificial Sequence: Synthetic oligonucleotide
tgccgcctatgagcagccaca

SEQ ID NO: 22893 - RNA, 21 nt, synthetic construct
  source 1..21: mol_type = other RNA; note = Description of Artificial Sequence: Synthetic oligonucleotide
gccgcctatgagcagccacat

SEQ ID NO: 22894 - RNA, 21 nt, synthetic construct
  source 1..21: mol_type = other RNA; note = Description of Artificial Sequence: Synthetic oligonucleotide
ccgcctatgagcagccacatt

SEQ ID NO: 22895 - RNA, 21 nt, synthetic construct
  source 1..21: mol_type = other RNA; note = Description of Artificial Sequence: Synthetic oligonucleotide
cgcctatgagcagccacattg

SEQ ID NO: 22896 - RNA, 21 nt, synthetic construct
  source 1..21: mol_type = other RNA; note = Description of Artificial Sequence: Synthetic oligonucleotide
gcctatgagcagccacattgc

SEQ ID NO: 22897 - RNA, 21 nt, synthetic construct
  source 1..21: mol_type = other RNA; note = Description of Artificial Sequence: Synthetic oligonucleotide
cctatgagcagccacattgcc

SEQ ID NO: 22898 - RNA, 21 nt, synthetic construct
  source 1..21: mol_type = other RNA; note = Description of Artificial Sequence: Synthetic oligonucleotide
ctatgagcagccacattgcct

SEQ ID NO: 22899 - RNA, 21 nt, synthetic construct
  source 1..21: mol_type = other RNA; note = Description of Artificial Sequence: Synthetic oligonucleotide
tatgagcagccacattgcctt

SEQ ID NO: 22900 - RNA, 21 nt, synthetic construct
  source 1..21: mol_type = other RNA; note = Description of Artificial Sequence: Synthetic oligonucleotide
atgagcagccacattgcctta

SEQ ID NO: 22901 - RNA, 21 nt, synthetic construct
  source 1..21: mol_type = other RNA; note = Description of Artificial Sequence: Synthetic oligonucleotide
tgagcagccacattgccttac

SEQ ID NO: 22902 - RNA, 21 nt, synthetic construct
  source 1..21: mol_type = other RNA; note = Description of Artificial Sequence: Synthetic oligonucleotide
gagcagccacattgccttact

SEQ ID NO: 22903 - RNA, 21 nt, synthetic construct
  source 1..21: mol_type = other RNA; note = Description of Artificial Sequence: Synthetic oligonucleotide
agcagccacattgccttactg

SEQ ID NO: 22904 - RNA, 21 nt, synthetic construct
  source 1..21: mol_type = other RNA; note = Description of Artificial Sequence: Synthetic oligonucleotide
gcagccacattgccttactga

SEQ ID NO: 22905 - RNA, 21 nt, synthetic construct
  source 1..21: mol_type = other RNA; note = Description of Artificial Sequence: Synthetic oligonucleotide
cagccacattgccttactgaa

SEQ ID NO: 22906 - RNA, 21 nt, synthetic construct
  source 1..21: mol_type = other RNA; note = Description of Artificial Sequence: Synthetic oligonucleotide
agccacattgccttactgaaa

SEQ ID NO: 22907 - RNA, 21 nt, synthetic construct
  source 1..21: mol_type = other RNA; note = Description of Artificial Sequence: Synthetic oligonucleotide
accctcgccacgcccctgatt

SEQ ID NO: 22908 - RNA, 21 nt, synthetic construct
  source 1..21: mol_type = other RNA; note = Description of Artificial Sequence: Synthetic oligonucleotide
ccctcgccacgcccctgcatt

SEQ ID NO: 22909 - RNA, 21 nt, synthetic construct
  source 1..21: mol_type = other RNA; note = Description of Artificial Sequence: Synthetic oligonucleotide
cctcgccacgcccctgctatt

SEQ ID NO: 22910 - RNA, 21 nt, synthetic construct
  source 1..21: mol_type = other RNA; note = Description of Artificial Sequence: Synthetic oligonucleotide
ctcgccacgcccctgctcatt

SEQ ID NO: 22911 - RNA, 21 nt, synthetic construct
  source 1..21: mol_type = other RNA; note = Description of Artificial Sequence: Synthetic oligonucleotide
tcgccacgcccctgctccatt

SEQ ID NO: 22912 - RNA, 21 nt, synthetic construct
  source 1..21: mol_type = other RNA; note = Description of Artificial Sequence: Synthetic oligonucleotide
cgccacgcccctgctcccatt

SEQ ID NO: 22913 - RNA, 21 nt, synthetic construct
  source 1..21: mol_type = other RNA; note = Description of Artificial Sequence: Synthetic oligonucleotide
gccacgcccctgctccccatt

SEQ ID NO: 22914 - RNA, 21 nt, synthetic construct
  source 1..21: mol_type = other RNA; note = Description of Artificial Sequence: Synthetic oligonucleotide
ccacgcccctgctcccccatt

SEQ ID NO: 22915 - RNA, 21 nt, synthetic construct
  source 1..21: mol_type = other RNA; note = Description of Artificial Sequence: Synthetic oligonucleotide
cacgcccctgctcccccgatt

SEQ ID NO: 22916 - RNA, 21 nt, synthetic construct
  source 1..21: mol_type = other RNA; note = Description of Artificial Sequence: Synthetic oligonucleotide
acgcccctgctcccccgcatt

SEQ ID NO: 22917 - RNA, 21 nt, synthetic construct
  source 1..21: mol_type = other RNA; note = Description of Artificial Sequence: Synthetic oligonucleotide
cgcccctgctcccccgcgatt

SEQ ID NO: 22918 - RNA, 21 nt, synthetic construct
  source 1..21: mol_type = other RNA; note = Description of Artificial Sequence: Synthetic oligonucleotide
gcccctgctcccccgcggatt

SEQ ID NO: 22919 - RNA, 21 nt, synthetic construct
  source 1..21: mol_type = other RNA; note = Description of Artificial Sequence: Synthetic oligonucleotide
cccctgctcccccgcggtatt

SEQ ID NO: 22920 - RNA, 21 nt, synthetic construct
  source 1..21: mol_type = other RNA; note = Description of Artificial Sequence: Synthetic oligonucleotide
ccctgctcccccgcggttatt

SEQ ID NO: 22921 - RNA, 21 nt, synthetic construct
  source 1..21: mol_type = other RNA; note = Description of Artificial Sequence: Synthetic oligonucleotide
cctgctcccccgcggttgatt

SEQ ID NO: 22922 - RNA, 21 nt, synthetic construct
  source 1..21: mol_type = other RNA; note = Description of Artificial Sequence: Synthetic oligonucleotide
ctgctcccccgcggttggatt

SEQ ID NO: 22923 - RNA, 21 nt, synthetic construct
  source 1..21: mol_type = other RNA; note = Description of Artificial Sequence: Synthetic oligonucleotide
tgctcccccgcggttggtatt

SEQ ID NO: 22924 - RNA, 21 nt, synthetic construct
  source 1..21: mol_type = other RNA; note = Description of Artificial Sequence: Synthetic oligonucleotide
gctcccccgcggttggttatt

SEQ ID NO: 22925 - RNA, 21 nt, synthetic construct
  source 1..21: mol_type = other RNA; note = Description of Artificial Sequence: Synthetic oligonucleotide
ctcccccgcggttggttcatt

SEQ ID NO: 22926 - RNA, 21 nt, synthetic construct
  source 1..21: mol_type = other RNA; note = Description of Artificial Sequence: Synthetic oligonucleotide
tcccccgcggttggttctatt

SEQ ID NO: 22927 - RNA, 21 nt, synthetic construct
  source 1..21: mol_type = other RNA; note = Description of Artificial Sequence: Synthetic oligonucleotide
cccccgcggttggttcttatt

SEQ ID NO: 22928 - RNA, 21 nt, synthetic construct
  source 1..21: mol_type = other RNA; note = Description of Artificial Sequence: Synthetic oligonucleotide
ccccgcggttggttcttcatt

SEQ ID NO: 22929 - RNA, 21 nt, synthetic construct
  source 1..21: mol_type = other RNA; note = Description of Artificial Sequence: Synthetic oligonucleotide
cccgcggttggttcttccatt

SEQ ID NO: 22930 - RNA, 21 nt, synthetic construct
  source 1..21: mol_type = other RNA; note = Description of Artificial Sequence: Synthetic oligonucleotide
ccgcggttggttcttcctatt

SEQ ID NO: 22931 - RNA, 21 nt, synthetic construct
  source 1..21: mol_type = other RNA; note = Description of Artificial Sequence: Synthetic oligonucleotide
cgcggttggttcttccttatt

SEQ ID NO: 22932 - RNA, 21 nt, synthetic construct
  source 1..21: mol_type = other RNA; note = Description of Artificial Sequence: Synthetic oligonucleotide
gcggttggttcttccttgatt

SEQ ID NO: 22933 - RNA, 21 nt, synthetic construct
  source 1..21: mol_type = other RNA; note = Description of Artificial Sequence: Synthetic oligonucleotide
cggttggttcttccttgcatt

SEQ ID NO: 22934 - RNA, 21 nt, synthetic construct
  source 1..21: mol_type = other RNA; note = Description of Artificial Sequence: Synthetic oligonucleotide
ggttggttcttccttgctatt

SEQ ID NO: 22935 - RNA, 21 nt, synthetic construct
  source 1..21: mol_type = other RNA; note = Description of Artificial Sequence: Synthetic oligonucleotide
gttggttcttccttgctcatt

SEQ ID NO: 22936 - RNA, 21 nt, synthetic construct
  source 1..21: mol_type = other RNA; note = Description of Artificial Sequence: Synthetic oligonucleotide
ttggttcttccttgctctatt

SEQ ID NO: 22937 - RNA, 21 nt, synthetic construct
  source 1..21: mol_type = other RNA; note = Description of Artificial Sequence: Synthetic oligonucleotide
tggttcttccttgctctaatt

SEQ ID NO: 22938 - RNA, 21 nt, synthetic construct
  source 1..21: mol_type = other RNA; note = Description of Artificial Sequence: Synthetic oligonucleotide
ggttcttccttgctctacatt

SEQ ID NO: 22939 - RNA, 21 nt, synthetic construct
  source 1..21: mol_type = other RNA; note = Description of Artificial Sequence: Synthetic oligonucleotide
gttcttccttgctctactatt

SEQ ID NO: 22940 - RNA, 21 nt, synthetic construct
  source 1..21: mol_type = other RNA; note = Description of Artificial Sequence: Synthetic oligonucleotide
ttcttccttgctctactcatt

SEQ ID NO: 22941 - RNA, 21 nt, synthetic construct
  source 1..21: mol_type = other RNA; note = Description of Artificial Sequence: Synthetic oligonucleotide
tcttccttgctctactcaatt

SEQ ID NO: 22942 - RNA, 21 nt, synthetic construct
  source 1..21: mol_type = other RNA; note = Description of Artificial Sequence: Synthetic oligonucleotide
cttccttgctctactcaaatt

SEQ ID NO: 22943 - RNA, 21 nt, synthetic construct
  source 1..21: mol_type = other RNA; note = Description of Artificial Sequence: Synthetic oligonucleotide
ttccttgctctactcaacatt

SEQ ID NO: 22944 - RNA, 21 nt, synthetic construct
  source 1..21: mol_type = other RNA; note = Description of Artificial Sequence: Synthetic oligonucleotide
tccttgctctactcaaccatt

SEQ ID NO: 22945 - RNA, 21 nt, synthetic construct
  source 1..21: mol_type = other RNA; note = Description of Artificial Sequence: Synthetic oligonucleotide
ccttgctctactcaacccatt

SEQ ID NO: 22946 - RNA, 21 nt, synthetic construct
  source 1..21: mol_type = other RNA; note = Description of Artificial Sequence: Synthetic oligonucleotide
cttgctctactcaaccctatt

SEQ ID NO: 22947 - RNA, 21 nt, synthetic construct
  source 1..21: mol_type = other RNA; note = Description of Artificial Sequence: Synthetic oligonucleotide
ttgctctactcaaccctgatt

SEQ ID NO: 22948 - RNA, 21 nt, synthetic construct
  source 1..21: mol_type = other RNA; note = Description of Artificial Sequence: Synthetic oligonucleotide
tgctctactcaaccctgaatt

SEQ ID NO: 22949 - RNA, 21 nt, synthetic construct
  source 1..21: mol_type = other RNA; note = Description of Artificial Sequence: Synthetic oligonucleotide
gctctactcaaccctgacatt

SEQ ID NO: 22950 - RNA, 21 nt, synthetic construct
  source 1..21: mol_type = other RNA; note = Description of Artificial Sequence: Synthetic oligonucleotide
ctctactcaaccctgaccatt

SEQ ID NO: 22951 - RNA, 21 nt, synthetic construct
  source 1..21: mol_type = other RNA; note = Description of Artificial Sequence: Synthetic oligonucleotide
tctactcaaccctgacctatt

SEQ ID NO: 22952 - RNA, 21 nt, synthetic construct
  source 1..21: mol_type = other RNA; note = Description of Artificial Sequence: Synthetic oligonucleotide
ctactcaaccctgacctcatt

SEQ ID NO: 22953 - RNA, 21 nt, synthetic construct
  source 1..21: mol_type = other RNA; note = Description of Artificial Sequence: Synthetic oligonucleotide
tactcaaccctgacctctatt

SEQ ID NO: 22954 - RNA, 21 nt, synthetic construct
  source 1..21: mol_type = other RNA; note = Description of Artificial Sequence: Synthetic oligonucleotide
actcaaccctgacctcttatt

SEQ ID NO: 22955 - RNA, 21 nt, synthetic construct
  source 1..21: mol_type = other RNA; note = Description of Artificial Sequence: Synthetic oligonucleotide
ctcaaccctgacctcttcatt

SEQ ID NO: 22956 - RNA, 21 nt, synthetic construct
  source 1..21: mol_type = other RNA; note = Description of Artificial Sequence: Synthetic oligonucleotide
tcaaccctgacctcttctatt

SEQ ID NO: 22957 - RNA, 21 nt, synthetic construct
  source 1..21: mol_type = other RNA; note = Description of Artificial Sequence: Synthetic oligonucleotide
caaccctgacctcttctcatt

SEQ ID NO: 22958 - RNA, 21 nt, synthetic construct
  source 1..21: mol_type = other RNA; note = Description of Artificial Sequence: Synthetic oligonucleotide
aaccctgacctcttctctatt

SEQ ID NO: 22959 - RNA, 21 nt, synthetic construct
  source 1..21: mol_type = other RNA; note = Description of Artificial Sequence: Synthetic oligonucleotide
accctgacctcttctctcatt

SEQ ID NO: 22960 - RNA, 21 nt, synthetic construct
  source 1..21: mol_type = other RNA; note = Description of Artificial Sequence: Synthetic oligonucleotide
ccctgacctcttctctctatt

SEQ ID NO: 22961 - RNA, 21 nt, synthetic construct
  source 1..21: mol_type = other RNA; note = Description of Artificial Sequence: Synthetic oligonucleotide
cctgacctcttctctctgatt

SEQ ID NO: 22962 - RNA, 21 nt, synthetic construct
  source 1..21: mol_type = other RNA; note = Description of Artificial Sequence: Synthetic oligonucleotide
ctgacctcttctctctgaatt

SEQ ID NO: 22963 - RNA, 21 nt, synthetic construct
  source 1..21: mol_type = other RNA; note = Description of Artificial Sequence: Synthetic oligonucleotide
tgacctcttctctctgacatt

SEQ ID NO: 22964 - RNA, 21 nt, synthetic construct
  source 1..21: mol_type = other RNA; note = Description of Artificial Sequence: Synthetic oligonucleotide
gacctcttctctctgactatt

SEQ ID NO: 22965 - RNA, 21 nt, synthetic construct
  source 1..21: mol_type = other RNA; note = Description of Artificial Sequence: Synthetic oligonucleotide
acctcttctctctgactcatt

SEQ ID NO: 22966 - RNA, 21 nt, synthetic construct
  source 1..21: mol_type = other RNA; note = Description of Artificial Sequence: Synthetic oligonucleotide
cctcttctctctgactctatt

SEQ ID NO: 22967 - RNA, 21 nt, synthetic construct
  source 1..21: mol_type = other RNA; note = Description of Artificial Sequence: Synthetic oligonucleotide
ctcttctctctgactctcatt

SEQ ID NO: 22968 - RNA, 21 nt, synthetic construct
  source 1..21: mol_type = other RNA; note = Description of Artificial Sequence: Synthetic oligonucleotide
tcttctctctgactctcgatt

SEQ ID NO: 22969 - RNA, 21 nt, synthetic construct
  source 1..21: mol_type = other RNA; note = Description of Artificial Sequence: Synthetic oligonucleotide
cttctctctgactctcgaatt

SEQ ID NO: 22970 - RNA, 21 nt, synthetic construct
  source 1..21: mol_type = other RNA; note = Description of Artificial Sequence: Synthetic oligonucleotide
ttctctctgactctcgacatt

SEQ ID NO: 22971 - RNA, 21 nt, synthetic construct
  source 1..21: mol_type = other RNA; note = Description of Artificial Sequence: Synthetic oligonucleotide
tctctctgactctcgactatt

SEQ ID NO: 22972 - RNA, 21 nt, synthetic construct
  source 1..21: mol_type = other RNA; note = Description of Artificial Sequence: Synthetic oligonucleotide
ctctctgactctcgacttatt

SEQ ID NO: 22973 - RNA, 21 nt, synthetic construct
  source 1..21: mol_type = other RNA; note = Description of Artificial Sequence: Synthetic oligonucleotide
tctctgactctcgacttgatt

SEQ ID NO: 22974 - RNA, 21 nt, synthetic construct
  source 1..21: mol_type = other RNA; note = Description of Artificial Sequence: Synthetic oligonucleotide
ctctgactctcgacttgtatt

SEQ ID NO: 22975 - RNA, 21 nt, synthetic construct
  source 1..21: mol_type = other RNA; note = Description of Artificial Sequence: Synthetic oligonucleotide
tctgactctcgacttgtgatt

SEQ ID NO: 22976 - RNA, 21 nt, synthetic construct
  source 1..21: mol_type = other RNA; note = Description of Artificial Sequence: Synthetic oligonucleotide
ctgactctcgacttgtgtatt

SEQ ID NO: 22977 - RNA, 21 nt, synthetic construct
  source 1..21: mol_type = other RNA; note = Description of Artificial Sequence: Synthetic oligonucleotide
tgactctcgacttgtgttatt

SEQ ID NO: 22978 - RNA, 21 nt, synthetic construct
  source 1..21: mol_type = other RNA; note = Description of Artificial Sequence: Synthetic oligonucleotide
gactctcgacttgtgttcatt

SEQ ID NO: 22979 - RNA, 21 nt, synthetic construct
  source 1..21: mol_type = other RNA; note = Description of Artificial Sequence: Synthetic oligonucleotide
actctcgacttgtgttccatt

SEQ ID NO: 22980 - RNA, 21 nt, synthetic construct
  source 1..21: mol_type = other RNA; note = Description of Artificial Sequence: Synthetic oligonucleotide
ctctcgacttgtgttcccatt

SEQ ID NO: 22981 - RNA, 21 nt, synthetic construct
  source 1..21: mol_type = other RNA; note = Description of Artificial Sequence: Synthetic oligonucleotide
tctcgacttgtgttccccatt

SEQ ID NO: 22982 - RNA, 21 nt, synthetic construct
  source 1..21: mol_type = other RNA; note = Description of Artificial Sequence: Synthetic oligonucleotide
ctcgacttgtgttccccgatt

SEQ ID NO: 22983 - RNA, 21 nt, synthetic construct
  source 1..21: mol_type = other RNA; note = Description of Artificial Sequence: Synthetic oligonucleotide
tcgacttgtgttccccgcatt

SEQ ID NO: 22984 - RNA, 21 nt, synthetic construct
  source 1..21: mol_type = other RNA; note = Description of Artificial Sequence: Synthetic oligonucleotide
cgacttgtgttccccgctatt

SEQ ID NO: 22985 - RNA, 21 nt, synthetic construct
  source 1..21: mol_type = other RNA; note = Description of Artificial Sequence: Synthetic oligonucleotide
gacttgtgttccccgctcatt

SEQ ID NO: 22986 - RNA, 21 nt, synthetic construct
  source 1..21: mol_type = other RNA; note = Description of Artificial Sequence: Synthetic oligonucleotide
acttgtgttccccgctccatt

SEQ ID NO: 22987 - RNA, 21 nt, synthetic construct
  source 1..21: mol_type = other RNA; note = Description of Artificial Sequence: Synthetic oligonucleotide
cttgtgttccccgctcctatt

SEQ ID NO: 22988 - RNA, 21 nt, synthetic construct
  source 1..21: mol_type = other RNA; note = Description of Artificial Sequence: Synthetic oligonucleotide
ttgtgttccccgctcctcatt

SEQ ID NO: 22989 - RNA, 21 nt, synthetic construct
  source 1..21: mol_type = other RNA; note = Description of Artificial Sequence: Synthetic oligonucleotide
tgtgttccccgctcctccatt

SEQ ID NO: 22990 - RNA, 21 nt, synthetic construct
  source 1..21: mol_type = other RNA; note = Description of Artificial Sequence: Synthetic oligonucleotide
gtgttccccgctcctcccatt

SEQ ID NO: 22991 - RNA, 21 nt, synthetic construct
  source 1..21: mol_type = other RNA; note = Description of Artificial Sequence: Synthetic oligonucleotide
tgttccccgctcctccctatt

SEQ ID NO: 22992 - RNA, 21 nt, synthetic construct
  source 1..21: mol_type = other RNA; note = Description of Artificial Sequence: Synthetic oligonucleotide
gttccccgctcctccctgatt

SEQ ID NO: 22993 - RNA, 21 nt, synthetic construct
  source 1..21: mol_type = other RNA; note = Description of Artificial Sequence: Synthetic oligonucleotide
ttccccgctcctccctgaatt

SEQ ID NO: 22994 - RNA, 21 nt, synthetic construct
  source 1..21: mol_type = other RNA; note = Description of Artificial Sequence: Synthetic oligonucleotide
tccccgctcctccctgacatt

SEQ ID NO: 22995 - RNA, 21 nt, synthetic construct
  source 1..21: mol_type = other RNA; note = Description of Artificial Sequence: Synthetic oligonucleotide
ccccgctcctccctgaccatt

SEQ ID NO: 22996 - RNA, 21 nt, synthetic construct
  source 1..21: mol_type = other RNA; note = Description of Artificial Sequence: Synthetic oligonucleotide
cccgctcctccctgacctatt

SEQ ID NO: 22997 - RNA, 21 nt, synthetic construct
  source 1..21: mol_type = other RNA; note = Description of Artificial Sequence: Synthetic oligonucleotide
ccgctcctccctgaccttatt

SEQ ID NO: 22998 - RNA, 21 nt, synthetic construct
  source 1..21: mol_type = other RNA; note = Description of Artificial Sequence: Synthetic oligonucleotide
cgctcctccctgaccttcatt

SEQ ID NO: 22999 - RNA, 21 nt, synthetic construct
  source 1..21: mol_type = other RNA; note = Description of Artificial Sequence: Synthetic oligonucleotide
gctcctccctgaccttccatt

SEQ ID NO: 23000 - RNA, 21 nt, synthetic construct
  source 1..21: mol_type = other RNA; note = Description of Artificial Sequence: Synthetic oligonucleotide
ctcctccctgaccttcctatt

SEQ ID NO: 23001 - RNA, 21 nt, synthetic construct
  source 1..21: mol_type = other RNA; note = Description of Artificial Sequence: Synthetic oligonucleotide
tcctccctgaccttcctcatt

SEQ ID NO: 23002 - RNA, 21 nt, synthetic construct
  source 1..21: mol_type = other RNA; note = Description of Artificial Sequence: Synthetic oligonucleotide
cctccctgaccttcctccatt

SEQ ID NO: 23003 - RNA, 21 nt, synthetic construct
  source 1..21: mol_type = other RNA; note = Description of Artificial Sequence: Synthetic oligonucleotide
ctccctgaccttcctcccatt

SEQ ID NO: 23004 - RNA, 21 nt, synthetic construct
  source 1..21: mol_type = other RNA; note = Description of Artificial Sequence: Synthetic oligonucleotide
tccctgaccttcctccccatt

SEQ ID NO: 23005 - RNA, 21 nt, synthetic construct
  source 1..21: mol_type = other RNA; note = Description of Artificial Sequence: Synthetic oligonucleotide
ccctgaccttcctcccctatt

SEQ ID NO: 23006 - RNA, 21 nt, synthetic construct
  source 1..21: mol_type = other RNA; note = Description of Artificial Sequence: Synthetic oligonucleotide
cctgaccttcctcccctcatt

SEQ ID NO: 23007 - RNA, 21 nt, synthetic construct
  source 1..21: mol_type = other RNA; note = Description of Artificial Sequence: Synthetic oligonucleotide
ctgaccttcctcccctccatt

SEQ ID NO: 23008 - RNA, 21 nt, synthetic construct
  source 1..21: mol_type = other RNA; note = Description of Artificial Sequence: Synthetic oligonucleotide
tgaccttcctcccctcccatt

SEQ ID NO: 23009 - RNA, 21 nt, synthetic construct
  source 1..21: mol_type = other RNA; note = Description of Artificial Sequence: Synthetic oligonucleotide
gaccttcctcccctccccatt

SEQ ID NO: 23010 - RNA, 21 nt, synthetic construct
  source 1..21: mol_type = other RNA; note = Description of Artificial Sequence: Synthetic oligonucleotide
accttcctcccctcccctatt

SEQ ID NO: 23011 - RNA, 21 nt, synthetic construct
  source 1..21: mol_type = other RNA; note = Description of Artificial Sequence: Synthetic oligonucleotide
ccttcctcccctccccttatt

SEQ ID NO: 23012 - RNA, 21 nt, synthetic construct
  source 1..21: mol_type = other RNA; note = Description of Artificial Sequence: Synthetic oligonucleotide
cttcctcccctcccctttatt

SEQ ID NO: 23013 - RNA, 21 nt, synthetic construct
  source 1..21: mol_type = other RNA; note = Description of Artificial Sequence: Synthetic oligonucleotide
ttcctcccctcccctttcatt

SEQ ID NO: 23014 - RNA, 21 nt, synthetic construct
  source 1..21: mol_type = other RNA; note = Description of Artificial Sequence: Synthetic oligonucleotide
tcctcccctcccctttcaatt

SEQ ID NO: 23015 - RNA, 21 nt, synthetic construct
  source 1..21: mol_type = other RNA; note = Description of Artificial Sequence: Synthetic oligonucleotide
cctcccctcccctttcacatt

SEQ ID NO: 23016 - RNA, 21 nt, synthetic construct
  source 1..21: mol_type = other RNA; note = Description of Artificial Sequence: Synthetic oligonucleotide
ctcccctcccctttcactatt

SEQ ID NO: 23017 - RNA, 21 nt, synthetic construct
  source 1..21: mol_type = other RNA; note = Description of Artificial Sequence: Synthetic oligonucleotide
tcccctcccctttcactcatt

SEQ ID NO: 23018 - RNA, 21 nt, synthetic construct
  source 1..21: mol_type = other RNA; note = Description of Artificial Sequence: Synthetic oligonucleotide
cccctcccctttcactcaatt

SEQ ID NO: 23019 - RNA, 21 nt, synthetic construct
  source 1..21: mol_type = other RNA; note = Description of Artificial Sequence: Synthetic oligonucleotide
ccctcccctttcactcaaatt

SEQ ID NO: 23020 - RNA, 21 nt, synthetic construct
  source 1..21: mol_type = other RNA; note = Description of Artificial Sequence: Synthetic oligonucleotide
cctcccctttcactcaatatt

SEQ ID NO: 23021 - RNA, 21 nt, synthetic construct
  source 1..21: mol_type = other RNA; note = Description of Artificial Sequence: Synthetic oligonucleotide
ctcccctttcactcaattatt

SEQ ID NO: 23022 - RNA, 21 nt, synthetic construct
  source 1..21: mol_type = other RNA; note = Description of Artificial Sequence: Synthetic oligonucleotide
tcccctttcactcaattcatt

SEQ ID NO: 23023 - RNA, 21 nt, synthetic construct
  source 1..21: mol_type = other RNA; note = Description of Artificial Sequence: Synthetic oligonucleotide
cccctttcactcaattctatt

SEQ ID NO: 23024 - RNA, 21 nt, synthetic construct
  source 1..21: mol_type = other RNA; note = Description of Artificial Sequence: Synthetic oligonucleotide
ccctttcactcaattctcatt

SEQ ID NO: 23025 - RNA, 21 nt, synthetic construct
  source 1..21: mol_type = other RNA; note = Description of Artificial Sequence: Synthetic oligonucleotide
cctttcactcaattctcaatt

SEQ ID NO: 23026 - RNA, 21 nt, synthetic construct
  source 1..21: mol_type = other RNA; note = Description of Artificial Sequence: Synthetic oligonucleotide
ctttcactcaattctcacatt

SEQ ID NO: 23027 - RNA, 21 nt, synthetic construct
  source 1..21: mol_type = other RNA; note = Description of Artificial Sequence: Synthetic oligonucleotide
tttcactcaattctcaccatt

SEQ ID NO: 23028 - RNA, 21 nt, synthetic construct
  source 1..21: mol_type = other RNA; note = Description of Artificial Sequence: Synthetic oligonucleotide
ttcactcaattctcaccaatt

SEQ ID NO: 23029 - RNA, 21 nt, synthetic construct
  source 1..21: mol_type = other RNA; note = Description of Artificial Sequence: Synthetic oligonucleotide
tcactcaattctcaccaaatt

SEQ ID NO: 23030 - RNA, 21 nt, synthetic construct
  source 1..21: mol_type = other RNA; note = Description of Artificial Sequence: Synthetic oligonucleotide
cactcaattctcaccaacatt

SEQ ID NO: 23031 - RNA, 21 nt, synthetic construct
  source 1..21: mol_type = other RNA; note = Description of Artificial Sequence: Synthetic oligonucleotide
actcaattctcaccaactatt

SEQ ID NO: 23032 - RNA, 21 nt, synthetic construct
  source 1..21: mol_type = other RNA; note = Description of Artificial Sequence: Synthetic oligonucleotide
ctcaattctcaccaactcatt

SEQ ID NO: 23033 - RNA, 21 nt, synthetic construct
  source 1..21: mol_type = other RNA; note = Description of Artificial Sequence: Synthetic oligonucleotide
tcaattctcaccaactctatt

SEQ ID NO: 23034 - RNA, 21 nt, synthetic construct
  source 1..21: mol_type = other RNA; note = Description of Artificial Sequence: Synthetic oligonucleotide
caattctcaccaactcttatt

SEQ ID NO: 23035 - RNA, 21 nt, synthetic construct
  source 1..21: mol_type = other RNA; note = Description of Artificial Sequence: Synthetic oligonucleotide
aattctcaccaactctttatt

SEQ ID NO: 23036 - RNA, 21 nt, synthetic construct
  source 1..21: mol_type = other RNA; note = Description of Artificial Sequence: Synthetic oligonucleotide
attctcaccaactctttcatt

SEQ ID NO: 23037 - RNA, 21 nt, synthetic construct
  source 1..21: mol_type = other RNA; note = Description of Artificial Sequence: Synthetic oligonucleotide
ttctcaccaactctttctatt

SEQ ID NO: 23038 - RNA, 21 nt, synthetic construct
  source 1..21: mol_type = other RNA; note = Description of Artificial Sequence: Synthetic oligonucleotide
tctcaccaactctttctcatt

SEQ ID NO: 23039 - RNA, 21 nt, synthetic construct
  source 1..21: mol_type = other RNA; note = Description of Artificial Sequence: Synthetic oligonucleotide
ctcaccaactctttctctatt

SEQ ID NO: 23040 - RNA, 21 nt, synthetic construct
  source 1..21: mol_type = other RNA; note = Description of Artificial Sequence: Synthetic oligonucleotide
tcaccaactctttctctcatt

SEQ ID NO: 23041 - RNA, 21 nt, synthetic construct
  source 1..21: mol_type = other RNA; note = Description of Artificial Sequence: Synthetic oligonucleotide
caccaactctttctctctatt

SEQ ID NO: 23042 - RNA, 21 nt, synthetic construct
  source 1..21: mol_type = other RNA; note = Description of Artificial Sequence: Synthetic oligonucleotide
accaactctttctctctcatt

SEQ ID NO: 23043 - RNA, 21 nt, synthetic construct
  source 1..21: mol_type = other RNA; note = Description of Artificial Sequence: Synthetic oligonucleotide
ccaactctttctctctctatt

SEQ ID NO: 23044 - RNA, 21 nt, synthetic construct
  source 1..21: mol_type = other RNA; note = Description of Artificial Sequence: Synthetic oligonucleotide
caactctttctctctctgatt

SEQ ID NO: 23045 - RNA, 21 nt, synthetic construct
  source 1..21: mol_type = other RNA; note = Description of Artificial Sequence: Synthetic oligonucleotide
aactctttctctctctggatt

SEQ ID NO: 23046 - RNA, 21 nt, synthetic construct
  source 1..21: mol_type = other RNA; note = Description of Artificial Sequence: Synthetic oligonucleotide
actctttctctctctggtatt

SEQ ID NO: 23047 - RNA, 21 nt, synthetic construct
  source 1..21: mol_type = other RNA; note = Description of Artificial Sequence: Synthetic oligonucleotide
ctctttctctctctggtgatt

SEQ ID NO: 23048 - RNA, 21 nt, synthetic construct
  source 1..21: mol_type = other RNA; note = Description of Artificial Sequence: Synthetic oligonucleotide
tctttctctctctggtgtatt

SEQ ID NO: 23049 - RNA, 21 nt, synthetic construct
  source 1..21: mol_type = other RNA; note = Description of Artificial Sequence: Synthetic oligonucleotide
ctttctctctctggtgttatt

SEQ ID NO: 23050 - RNA, 21 nt, synthetic construct
  source 1..21: mol_type = other RNA; note = Description of Artificial Sequence: Synthetic oligonucleotide
tttctctctctggtgtttatt

SEQ ID NO: 23051 - RNA, 21 nt, synthetic construct
  source 1..21: mol_type = other RNA; note = Description of Artificial Sequence: Synthetic oligonucleotide
ttctctctctggtgttttatt

SEQ ID NO: 23052 - RNA, 21 nt, synthetic construct
  source 1..21: mol_type = other RNA; note = Description of Artificial Sequence: Synthetic oligonucleotide
tctctctctggtgttttcatt

SEQ ID NO: 23053 - RNA, 21 nt, synthetic construct
  source 1..21: mol_type = other RNA; note = Description of Artificial Sequence: Synthetic oligonucleotide
ctctctctggtgttttctatt

SEQ ID NO: 23054 - RNA, 21 nt, synthetic construct
  source 1..21: mol_type = other RNA; note = Description of Artificial Sequence: Synthetic oligonucleotide
tctctctggtgttttctcatt

SEQ ID NO: 23055 - RNA, 21 nt, synthetic construct
  source 1..21: mol_type = other RNA; note = Description of Artificial Sequence: Synthetic oligonucleotide
ctctctggtgttttctccatt

SEQ ID NO: 23056 - RNA, 21 nt, synthetic construct
  source 1..21: mol_type = other RNA; note = Description of Artificial Sequence: Synthetic oligonucleotide
tctctggtgttttctcctatt

SEQ ID NO: 23057 - RNA, 21 nt, synthetic construct
  source 1..21: mol_type = other RNA; note = Description of Artificial Sequence: Synthetic oligonucleotide
ctctggtgttttctccttatt

SEQ ID NO: 23058 - RNA, 21 nt, synthetic construct
  source 1..21: mol_type = other RNA; note = Description of Artificial Sequence: Synthetic oligonucleotide
tctggtgttttctcctttatt

SEQ ID NO: 23059 - RNA, 21 nt, synthetic construct
  source 1..21: mol_type = other RNA; note = Description of Artificial Sequence: Synthetic oligonucleotide
ctggtgttttctccttttatt

SEQ ID NO: 23060 - RNA, 21 nt, synthetic construct
  source 1..21: mol_type = other RNA; note = Description of Artificial Sequence: Synthetic oligonucleotide
tggtgttttctccttttcatt

SEQ ID NO: 23061 - RNA, 21 nt, synthetic construct
  source 1..21: mol_type = other RNA; note = Description of Artificial Sequence: Synthetic oligonucleotide
ggtgttttctccttttctatt

SEQ ID NO: 23062 - RNA, 21 nt, synthetic construct
  source 1..21: mol_type = other RNA; note = Description of Artificial Sequence: Synthetic oligonucleotide
gtgttttctccttttctcatt

SEQ ID NO: 23063 - RNA, 21 nt, synthetic construct
  source 1..21: mol_type = other RNA; note = Description of Artificial Sequence: Synthetic oligonucleotide
tgttttctccttttctcgatt

SEQ ID NO: 23064 - RNA, 21 nt, synthetic construct
  source 1..21: mol_type = other RNA; note = Description of Artificial Sequence: Synthetic oligonucleotide
gttttctccttttctcgtatt

SEQ ID NO: 23065 - RNA, 21 nt, synthetic construct
  source 1..21: mol_type = other RNA; note = Description of Artificial Sequence: Synthetic oligonucleotide
ttttctccttttctcgtaatt

SEQ ID NO: 23066 - RNA, 21 nt, synthetic construct
  source 1..21: mol_type = other RNA; note = Description of Artificial Sequence: Synthetic oligonucleotide
tttctccttttctcgtaaatt

SEQ ID NO: 23067 - RNA, 21 nt, synthetic construct
  source 1..21: mol_type = other RNA; note = Description of Artificial Sequence: Synthetic oligonucleotide
ttctccttttctcgtaaaatt

SEQ ID NO: 23068 - RNA, 21 nt, synthetic construct
  source 1..21: mol_type = other RNA; note = Description of Artificial Sequence: Synthetic oligonucleotide
tctccttttctcgtaaacatt

SEQ ID NO: 23069 - RNA, 21 nt, synthetic construct
  source 1..21: mol_type = other RNA; note = Description of Artificial Sequence: Synthetic oligonucleotide
ctccttttctcgtaaactatt

SEQ ID NO: 23070 - RNA, 21 nt, synthetic construct
  source 1..21: mol_type = other RNA; note = Description of Artificial Sequence: Synthetic oligonucleotide
tccttttctcgtaaacttatt

SEQ ID NO: 23071 - RNA, 21 nt, synthetic construct
  source 1..21: mol_type = other RNA; note = Description of Artificial Sequence: Synthetic oligonucleotide
ccttttctcgtaaactttatt

SEQ ID NO: 23072 - RNA, 21 nt, synthetic construct
  source 1..21: mol_type = other RNA; note = Description of Artificial Sequence: Synthetic oligonucleotide
cttttctcgtaaactttgatt

SEQ ID NO: 23073 - RNA, 21 nt, synthetic construct
  source 1..21: mol_type = other RNA; note = Description of Artificial Sequence: Synthetic oligonucleotide
ttttctcgtaaactttgcatt

SEQ ID NO: 23074 - RNA, 21 nt, synthetic construct
  source 1..21: mol_type = other RNA; note = Description of Artificial Sequence: Synthetic oligonucleotide
tttctcgtaaactttgccatt

SEQ ID NO: 23075 - RNA, 21 nt, synthetic construct
  source 1..21: mol_type = other RNA; note = Description of Artificial Sequence: Synthetic oligonucleotide
ttctcgtaaactttgccgatt

SEQ ID NO: 23076 - RNA, 21 nt, synthetic construct
  source 1..21: mol_type = other RNA; note = Description of Artificial Sequence: Synthetic oligonucleotide
tctcgtaaactttgccgcatt

SEQ ID NO: 23077 - RNA, 21 nt, synthetic construct
  source 1..21: mol_type = other RNA; note = Description of Artificial Sequence: Synthetic oligonucleotide
ctcgtaaactttgccgccatt

SEQ ID NO: 23078 - RNA, 21 nt, synthetic construct
  source 1..21: mol_type = other RNA; note = Description of Artificial Sequence: Synthetic oligonucleotide
tcgtaaactttgccgcctatt

SEQ ID NO: 23079 - RNA, 21 nt, synthetic construct
  source 1..21: mol_type = other RNA; note = Description of Artificial Sequence: Synthetic oligonucleotide
cgtaaactttgccgcctaatt

SEQ ID NO: 23080 - RNA, 21 nt, synthetic construct
  source 1..21: mol_type = other RNA; note = Description of Artificial Sequence: Synthetic oligonucleotide
gtaaactttgccgcctatatt

SEQ ID NO: 23081 - RNA, 21 nt, synthetic construct
  source 1..21: mol_type = other RNA; note = Description of Artificial Sequence: Synthetic oligonucleotide
taaactttgccgcctatgatt

SEQ ID NO: 23082 - RNA, 21 nt, synthetic construct
  source 1..21: mol_type = other RNA; note = Description of Artificial Sequence: Synthetic oligonucleotide
aaactttgccgcctatgaatt

SEQ ID NO: 23083 - RNA, 21 nt, synthetic construct
  source 1..21: mol_type = other RNA; note = Description of Artificial Sequence: Synthetic oligonucleotide
aactttgccgcctatgagatt

SEQ ID NO: 23084 - RNA, 21 nt, synthetic construct
  source 1..21: mol_type = other RNA; note = Description of Artificial Sequence: Synthetic oligonucleotide
actttgccgcctatgagcatt

SEQ ID NO: 23085 - RNA, 21 nt, synthetic construct
  source 1..21: mol_type = other RNA; note = Description of Artificial Sequence: Synthetic oligonucleotide
ctttgccgcctatgagcaatt

SEQ ID NO: 23086 - RNA, 21 nt, synthetic construct
  source 1..21: mol_type = other RNA; note = Description of Artificial Sequence: Synthetic oligonucleotide
tttgccgcctatgagcagatt

SEQ ID NO: 23087 - RNA, 21 nt, synthetic construct
  source 1..21: mol_type = other RNA; note = Description of Artificial Sequence: Synthetic oligonucleotide
ttgccgcctatgagcagcatt

SEQ ID NO: 23088 - RNA, 21 nt, synthetic construct
  source 1..21: mol_type = other RNA; note = Description of Artificial Sequence: Synthetic oligonucleotide
tgccgcctatgagcagccatt

SEQ ID NO: 23089 - RNA, 21 nt, synthetic construct
  source 1..21: mol_type = other RNA; note = Description of Artificial Sequence: Synthetic oligonucleotide
gccgcctatgagcagccaatt

SEQ ID NO: 23090 - RNA, 21 nt, synthetic construct
  source 1..21: mol_type = other RNA; note = Description of Artificial Sequence: Synthetic oligonucleotide
ccgcctatgagcagccacatt

SEQ ID NO: 23091 - RNA, 21 nt, synthetic construct
  source 1..21: mol_type = other RNA; note = Description of Artificial Sequence: Synthetic oligonucleotide
cgcctatgagcagccacaatt

SEQ ID NO: 23092 - RNA, 21 nt, synthetic construct
  source 1..21: mol_type = other RNA; note = Description of Artificial Sequence: Synthetic oligonucleotide
gcctatgagcagccacatatt

SEQ ID NO: 23093 - RNA, 21 nt, synthetic construct
  source 1..21: mol_type = other RNA; note = Description of Artificial Sequence: Synthetic oligonucleotide
cctatgagcagccacattatt

SEQ ID NO: 23094 - RNA, 21 nt, synthetic construct
  source 1..21: mol_type = other RNA; note = Description of Artificial Sequence: Synthetic oligonucleotide
ctatgagcagccacattgatt

SEQ ID NO: 23095 - RNA, 21 nt, synthetic construct
  source 1..21: mol_type = other RNA; note = Description of Artificial Sequence: Synthetic oligonucleotide
tatgagcagccacattgcatt

SEQ ID NO: 23096 - RNA, 21 nt, synthetic construct
  source 1..21: mol_type = other RNA; note = Description of Artificial Sequence: Synthetic oligonucleotide
atgagcagccacattgccatt

SEQ ID NO: 23097 - RNA, 21 nt, synthetic construct
  source 1..21: mol_type = other RNA; note = Description of Artificial Sequence: Synthetic oligonucleotide
tgagcagccacattgcctatt

SEQ ID NO: 23098 - RNA, 21 nt, synthetic construct
  source 1..21: mol_type = other RNA; note = Description of Artificial Sequence: Synthetic oligonucleotide
gagcagccacattgccttatt

SEQ ID NO: 23099 - RNA, 21 nt, synthetic construct
  source 1..21: mol_type = other RNA; note = Description of Artificial Sequence: Synthetic oligonucleotide
agcagccacattgccttaatt

SEQ ID NO: 23100 - RNA, 21 nt, synthetic construct
  source 1..21: mol_type = other RNA; note = Description of Artificial Sequence: Synthetic oligonucleotide
gcagccacattgccttacatt

SEQ ID NO: 23101 - RNA, 21 nt, synthetic construct
  source 1..21: mol_type = other RNA; note = Description of Artificial Sequence: Synthetic oligonucleotide
cagccacattgccttactatt

SEQ ID NO: 23102 - RNA, 21 nt, synthetic construct
  source 1..21: mol_type = other RNA; note = Description of Artificial Sequence: Synthetic oligonucleotide
agccacattgccttactgatt

SEQ ID NO: 23103 - RNA, 21 nt, synthetic construct
  source 1..21: mol_type = other RNA; note = Description of Artificial Sequence: Synthetic oligonucleotide
accctcgccacgcccctgatt

SEQ ID NO: 23104 - RNA, 21 nt, synthetic construct
  source 1..21: mol_type = other RNA; note = Description of Artificial Sequence: Synthetic oligonucleotide
ccctcgccacgcccctgcatt

SEQ ID NO: 23105 - RNA, 21 nt, synthetic construct
  source 1..21: mol_type = other RNA; note = Description of Artificial Sequence: Synthetic oligonucleotide
cctcgccacgcccctgctatt

SEQ ID NO: 23106 - RNA, 21 nt, synthetic construct
  source 1..21: mol_type = other RNA; note = Description of Artificial Sequence: Synthetic oligonucleotide
ctcgccacgcccctgctcatt

SEQ ID NO: 23107 - RNA, 21 nt, synthetic construct
  source 1..21: mol_type = other RNA; note = Description of Artificial Sequence: Synthetic oligonucleotide
tcgccacgcccctgctccatt

SEQ ID NO: 23108 - RNA, 21 nt, synthetic construct
  source 1..21: mol_type = other RNA; note = Description of Artificial Sequence: Synthetic oligonucleotide
cgccacgcccctgctcccatt

SEQ ID NO: 23109 - RNA, 21 nt, synthetic construct
  source 1..21: mol_type = other RNA; note = Description of Artificial Sequence: Synthetic oligonucleotide
gccacgcccctgctccccatt

SEQ ID NO: 23110 - RNA, 21 nt, synthetic construct
  source 1..21: mol_type = other RNA; note = Description of Artificial Sequence: Synthetic oligonucleotide
ccacgcccctgctcccccatt

SEQ ID NO: 23111 - RNA, 21 nt, synthetic construct
  source 1..21: mol_type = other RNA; note = Description of Artificial Sequence: Synthetic oligonucleotide
cacgcccctgctcccccgatt

SEQ ID NO: 23112 - RNA, 21 nt, synthetic construct
  source 1..21: mol_type = other RNA; note = Description of Artificial Sequence: Synthetic oligonucleotide
acgcccctgctcccccgcatt

SEQ ID NO: 23113 - RNA, 21 nt, synthetic construct
  source 1..21: mol_type = other RNA; note = Description of Artificial Sequence: Synthetic oligonucleotide
cgcccctgctcccccgcgatt

SEQ ID NO: 23114 - RNA, 21 nt, synthetic construct
  source 1..21: mol_type = other RNA; note = Description of Artificial Sequence: Synthetic oligonucleotide
gcccctgctcccccgcggatt

SEQ ID NO: 23115 - RNA, 21 nt, synthetic construct
  source 1..21: mol_type = other RNA; note = Description of Artificial Sequence: Synthetic oligonucleotide
cccctgctcccccgcggtatt

SEQ ID NO: 23116 - RNA, 21 nt, synthetic construct
  source 1..21: mol_type = other RNA; note = Description of Artificial Sequence: Synthetic oligonucleotide
ccctgctcccccgcggttatt

SEQ ID NO: 23117 - RNA, 21 nt, synthetic construct
  source 1..21: mol_type = other RNA; note = Description of Artificial Sequence: Synthetic oligonucleotide
cctgctcccccgcggttgatt

SEQ ID NO: 23118 - RNA, 21 nt, synthetic construct
  source 1..21: mol_type = other RNA; note = Description of Artificial Sequence: Synthetic oligonucleotide
ctgctcccccgcggttggatt

SEQ ID NO: 23119 - RNA, 21 nt, synthetic construct
  source 1..21: mol_type = other RNA; note = Description of Artificial Sequence: Synthetic oligonucleotide
tgctcccccgcggttggtatt

SEQ ID NO: 23120 - RNA, 21 nt, synthetic construct
  source 1..21: mol_type = other RNA; note = Description of Artificial Sequence: Synthetic oligonucleotide
gctcccccgcggttggttatt

SEQ ID NO: 23121 - RNA, 21 nt, synthetic construct
  source 1..21: mol_type = other RNA; note = Description of Artificial Sequence: Synthetic oligonucleotide
ctcccccgcggttggttcatt

SEQ ID NO: 23122 - RNA, 21 nt, synthetic construct
  source 1..21: mol_type = other RNA; note = Description of Artificial Sequence: Synthetic oligonucleotide
tcccccgcggttggttctatt

SEQ ID NO: 23123 - RNA, 21 nt, synthetic construct
  source 1..21: mol_type = other RNA; note = Description of Artificial Sequence: Synthetic oligonucleotide
cccccgcggttggttcttatt

SEQ ID NO: 23124 - RNA, 21 nt, synthetic construct
  source 1..21: mol_type = other RNA; note = Description of Artificial Sequence: Synthetic oligonucleotide
ccccgcggttggttcttcatt

SEQ ID NO: 23125 - RNA, 21 nt, synthetic construct
  source 1..21: mol_type = other RNA; note = Description of Artificial Sequence: Synthetic oligonucleotide
cccgcggttggttcttccatt

SEQ ID NO: 23126 - RNA, 21 nt, synthetic construct
  source 1..21: mol_type = other RNA; note = Description of Artificial Sequence: Synthetic oligonucleotide
ccgcggttggttcttcctatt

SEQ ID NO: 23127 - RNA, 21 nt, synthetic construct
  source 1..21: mol_type = other RNA; note = Description of Artificial Sequence: Synthetic oligonucleotide
cgcggttggttcttccttatt

SEQ ID NO: 23128 - RNA, 21 nt, synthetic construct
  source 1..21: mol_type = other RNA; note = Description of Artificial Sequence: Synthetic oligonucleotide
gcggttggttcttccttgatt

SEQ ID NO: 23129 - RNA, 21 nt, synthetic construct
  source 1..21: mol_type = other RNA; note = Description of Artificial Sequence: Synthetic oligonucleotide
cggttggttcttccttgcatt

SEQ ID NO: 23130 - RNA, 21 nt, synthetic construct
  source 1..21: mol_type = other RNA; note = Description of Artificial Sequence: Synthetic oligonucleotide
ggttggttcttccttgctatt

SEQ ID NO: 23131 - RNA, 21 nt, synthetic construct
  source 1..21: mol_type = other RNA; note = Description of Artificial Sequence: Synthetic oligonucleotide
gttggttcttccttgctcatt

SEQ ID NO: 23132 - RNA, 21 nt, synthetic construct
  source 1..21: mol_type = other RNA; note = Description of Artificial Sequence: Synthetic oligonucleotide
ttggttcttccttgctctatt

SEQ ID NO: 23133 - RNA, 21 nt, synthetic construct
  source 1..21: mol_type = other RNA; note = Description of Artificial Sequence: Synthetic oligonucleotide
tggttcttccttgctctaatt

SEQ ID NO: 23134 - RNA, 21 nt, synthetic construct
  source 1..21: mol_type = other RNA; note = Description of Artificial Sequence: Synthetic oligonucleotide
ggttcttccttgctctacatt

SEQ ID NO: 23135 - RNA, 21 nt, synthetic construct
  source 1..21: mol_type = other RNA; note = Description of Artificial Sequence: Synthetic oligonucleotide
gttcttccttgctctactatt

SEQ ID NO: 23136 - RNA, 21 nt, synthetic construct
  source 1..21: mol_type = other RNA; note = Description of Artificial Sequence: Synthetic oligonucleotide
ttcttccttgctctactcatt

SEQ ID NO: 23137 - RNA, 21 nt, synthetic construct
  source 1..21: mol_type = other RNA; note = Description of Artificial Sequence: Synthetic oligonucleotide
tcttccttgctctactcaatt

SEQ ID NO: 23138 - RNA, 21 nt, synthetic construct
  source 1..21: mol_type = other RNA; note = Description of Artificial Sequence: Synthetic oligonucleotide
cttccttgctctactcaaatt

SEQ ID NO: 23139 - RNA, 21 nt, synthetic construct
  source 1..21: mol_type = other RNA; note = Description of Artificial Sequence: Synthetic oligonucleotide
ttccttgctctactcaacatt

SEQ ID NO: 23140 - RNA, 21 nt, synthetic construct
  source 1..21: mol_type = other RNA; note = Description of Artificial Sequence: Synthetic oligonucleotide
tccttgctctactcaaccatt

SEQ ID NO: 23141 - RNA, 21 nt, synthetic construct
  source 1..21: mol_type = other RNA; note = Description of Artificial Sequence: Synthetic oligonucleotide
ccttgctctactcaacccatt

SEQ ID NO: 23142 - RNA, 21 nt, synthetic construct
  source 1..21: mol_type = other RNA; note = Description of Artificial Sequence: Synthetic oligonucleotide
cttgctctactcaaccctatt

SEQ ID NO: 23143 - RNA, 21 nt, synthetic construct
  source 1..21: mol_type = other RNA; note = Description of Artificial Sequence: Synthetic oligonucleotide
ttgctctactcaaccctgatt

SEQ ID NO: 23144 - RNA, 21 nt, synthetic construct
  source 1..21: mol_type = other RNA; note = Description of Artificial Sequence: Synthetic oligonucleotide
tgctctactcaaccctgaatt

SEQ ID NO: 23145 - RNA, 21 nt, synthetic construct
  source 1..21: mol_type = other RNA; note = Description of Artificial Sequence: Synthetic oligonucleotide
gctctactcaaccctgacatt

SEQ ID NO: 23146 - RNA, 21 nt, synthetic construct
  source 1..21: mol_type = other RNA; note = Description of Artificial Sequence: Synthetic oligonucleotide
ctctactcaaccctgaccatt

SEQ ID NO: 23147 - RNA, 21 nt, synthetic construct
  source 1..21: mol_type = other RNA; note = Description of Artificial Sequence: Synthetic oligonucleotide
tctactcaaccctgacctatt

SEQ ID NO: 23148 - RNA, 21 nt, synthetic construct
  source 1..21: mol_type = other RNA; note = Description of Artificial Sequence: Synthetic oligonucleotide
ctactcaaccctgacctcatt

SEQ ID NO: 23149 - RNA, 21 nt, synthetic construct
  source 1..21: mol_type = other RNA; note = Description of Artificial Sequence: Synthetic oligonucleotide
tactcaaccctgacctctatt

SEQ ID NO: 23150 - RNA, 21 nt, synthetic construct
  source 1..21: mol_type = other RNA; note = Description of Artificial Sequence: Synthetic oligonucleotide
actcaaccctgacctcttatt

SEQ ID NO: 23151 - RNA, 21 nt, synthetic construct
  source 1..21: mol_type = other RNA; note = Description of Artificial Sequence: Synthetic oligonucleotide
ctcaaccctgacctcttcatt

SEQ ID NO: 23152 - RNA, 21 nt, synthetic construct
  source 1..21: mol_type = other RNA; note = Description of Artificial Sequence: Synthetic oligonucleotide
tcaaccctgacctcttctatt

SEQ ID NO: 23153 - RNA, 21 nt, synthetic construct
  source 1..21: mol_type = other RNA; note = Description of Artificial Sequence: Synthetic oligonucleotide
caaccctgacctcttctcatt

SEQ ID NO: 23154 - RNA, 21 nt, synthetic construct
  source 1..21: mol_type = other RNA; note = Description of Artificial Sequence: Synthetic oligonucleotide
aaccctgacctcttctctatt

SEQ ID NO: 23155 - RNA, 21 nt, synthetic construct
  source 1..21: mol_type = other RNA; note = Description of Artificial Sequence: Synthetic oligonucleotide
accctgacctcttctctcatt

SEQ ID NO: 23156 - RNA, 21 nt, synthetic construct
  source 1..21: mol_type = other RNA; note = Description of Artificial Sequence: Synthetic oligonucleotide
ccctgacctcttctctctatt

SEQ ID NO: 23157 - RNA, 21 nt, synthetic construct
  source 1..21: mol_type = other RNA; note = Description of Artificial Sequence: Synthetic oligonucleotide
cctgacctcttctctctgatt

SEQ ID NO: 23158 - RNA, 21 nt, synthetic construct
  source 1..21: mol_type = other RNA; note = Description of Artificial Sequence: Synthetic oligonucleotide
ctgacctcttctctctgaatt

SEQ ID NO: 23159 - RNA, 21 nt, synthetic construct
  source 1..21: mol_type = other RNA; note = Description of Artificial Sequence: Synthetic oligonucleotide
tgacctcttctctctgacatt

SEQ ID NO: 23160 - RNA, 21 nt, synthetic construct
  source 1..21: mol_type = other RNA; note = Description of Artificial Sequence: Synthetic oligonucleotide
gacctcttctctctgactatt

SEQ ID NO: 23161 - RNA, 21 nt, synthetic construct
  source 1..21: mol_type = other RNA; note = Description of Artificial Sequence: Synthetic oligonucleotide
acctcttctctctgactcatt

SEQ ID NO: 23162 - RNA, 21 nt, synthetic construct
  source 1..21: mol_type = other RNA; note = Description of Artificial Sequence: Synthetic oligonucleotide
cctcttctctctgactctatt

SEQ ID NO: 23163 - RNA, 21 nt, synthetic construct
  source 1..21: mol_type = other RNA; note = Description of Artificial Sequence: Synthetic oligonucleotide
ctcttctctctgactctcatt

SEQ ID NO: 23164 - RNA, 21 nt, synthetic construct
  source 1..21: mol_type = other RNA; note = Description of Artificial Sequence: Synthetic oligonucleotide
tcttctctctgactctcgatt

SEQ ID NO: 23165 - RNA, 21 nt, synthetic construct
  source 1..21: mol_type = other RNA; note = Description of Artificial Sequence: Synthetic oligonucleotide
cttctctctgactctcgaatt

SEQ ID NO: 23166 - RNA, 21 nt, synthetic construct
  source 1..21: mol_type = other RNA; note = Description of Artificial Sequence: Synthetic oligonucleotide
ttctctctgactctcgacatt

SEQ ID NO: 23167 - RNA, 21 nt, synthetic construct
  source 1..21: mol_type = other RNA; note = Description of Artificial Sequence: Synthetic oligonucleotide
tctctctgactctcgactatt

SEQ ID NO: 23168 - RNA, 21 nt, synthetic construct
  source 1..21: mol_type = other RNA; note = Description of Artificial Sequence: Synthetic oligonucleotide
ctctctgactctcgacttatt

SEQ ID NO: 23169 - RNA, 21 nt, synthetic construct
  source 1..21: mol_type = other RNA; note = Description of Artificial Sequence: Synthetic oligonucleotide
tctctgactctcgacttgatt

SEQ ID NO: 23170 - RNA, 21 nt, synthetic construct
  source 1..21: mol_type = other RNA; note = Description of Artificial Sequence: Synthetic oligonucleotide
ctctgactctcgacttgtatt

SEQ ID NO: 23171 - RNA, 21 nt, synthetic construct
  source 1..21: mol_type = other RNA; note = Description of Artificial Sequence: Synthetic oligonucleotide
tctgactctcgacttgtgatt

SEQ ID NO: 23172 - RNA, 21 nt, synthetic construct
  source 1..21: mol_type = other RNA; note = Description of Artificial Sequence: Synthetic oligonucleotide
ctgactctcgacttgtgtatt

SEQ ID NO: 23173 - RNA, 21 nt, synthetic construct
  source 1..21: mol_type = other RNA; note = Description of Artificial Sequence: Synthetic oligonucleotide
tgactctcgacttgtgttatt

SEQ ID NO: 23174 - RNA, 21 nt, synthetic construct
  source 1..21: mol_type = other RNA; note = Description of Artificial Sequence: Synthetic oligonucleotide
gactctcgacttgtgttcatt

SEQ ID NO: 23175 - RNA, 21 nt, synthetic construct
  source 1..21: mol_type = other RNA; note = Description of Artificial Sequence: Synthetic oligonucleotide
actctcgacttgtgttccatt

SEQ ID NO: 23176 - RNA, 21 nt, synthetic construct
  source 1..21: mol_type = other RNA; note = Description of Artificial Sequence: Synthetic oligonucleotide
ctctcgacttgtgttcccatt

SEQ ID NO: 23177 - RNA, 21 nt, synthetic construct
  source 1..21: mol_type = other RNA; note = Description of Artificial Sequence: Synthetic oligonucleotide
tctcgacttgtgttccccatt

SEQ ID NO: 23178 - RNA, 21 nt, synthetic construct
  source 1..21: mol_type = other RNA; note = Description of Artificial Sequence: Synthetic oligonucleotide
ctcgacttgtgttccccgatt

SEQ ID NO: 23179 - RNA, 21 nt, synthetic construct
  source 1..21: mol_type = other RNA; note = Description of Artificial Sequence: Synthetic oligonucleotide
tcgacttgtgttccccgcatt

SEQ ID NO: 23180 - RNA, 21 nt, synthetic construct
  source 1..21: mol_type = other RNA; note = Description of Artificial Sequence: Synthetic oligonucleotide
cgacttgtgttccccgctatt

SEQ ID NO: 23181 - RNA, 21 nt, synthetic construct
  source 1..21: mol_type = other RNA; note = Description of Artificial Sequence: Synthetic oligonucleotide
gacttgtgttccccgctcatt

SEQ ID NO: 23182 - RNA, 21 nt, synthetic construct
  source 1..21: mol_type = other RNA; note = Description of Artificial Sequence: Synthetic oligonucleotide
acttgtgttccccgctccatt

SEQ ID NO: 23183 - RNA, 21 nt, synthetic construct
  source 1..21: mol_type = other RNA; note = Description of Artificial Sequence: Synthetic oligonucleotide
cttgtgttccccgctcctatt

SEQ ID NO: 23184 - RNA, 21 nt, synthetic construct
  source 1..21: mol_type = other RNA; note = Description of Artificial Sequence: Synthetic oligonucleotide
ttgtgttccccgctcctcatt

SEQ ID NO: 23185 - RNA, 21 nt, synthetic construct
  source 1..21: mol_type = other RNA; note = Description of Artificial Sequence: Synthetic oligonucleotide
tgtgttccccgctcctccatt

SEQ ID NO: 23186 - RNA, 21 nt, synthetic construct
  source 1..21: mol_type = other RNA; note = Description of Artificial Sequence: Synthetic oligonucleotide
gtgttccccgctcctcccatt

SEQ ID NO: 23187 - RNA, 21 nt, synthetic construct
  source 1..21: mol_type = other RNA; note = Description of Artificial Sequence: Synthetic oligonucleotide
tgttccccgctcctccctatt

SEQ ID NO: 23188 - RNA, 21 nt, synthetic construct
  source 1..21: mol_type = other RNA; note = Description of Artificial Sequence: Synthetic oligonucleotide
gttccccgctcctccctgatt

SEQ ID NO: 23189 - RNA, 21 nt, synthetic construct
  source 1..21: mol_type = other RNA; note = Description of Artificial Sequence: Synthetic oligonucleotide
ttccccgctcctccctgaatt

SEQ ID NO: 23190 - RNA, 21 nt, synthetic construct
  source 1..21: mol_type = other RNA; note = Description of Artificial Sequence: Synthetic oligonucleotide
tccccgctcctccctgacatt

SEQ ID NO: 23191 - RNA, 21 nt, synthetic construct
  source 1..21: mol_type = other RNA; note = Description of Artificial Sequence: Synthetic oligonucleotide
ccccgctcctccctgaccatt

SEQ ID NO: 23192 - RNA, 21 nt, synthetic construct
  source 1..21: mol_type = other RNA; note = Description of Artificial Sequence: Synthetic oligonucleotide
cccgctcctccctgacctatt

SEQ ID NO: 23193 - RNA, 21 nt, synthetic construct
  source 1..21: mol_type = other RNA; note = Description of Artificial Sequence: Synthetic oligonucleotide
ccgctcctccctgaccttatt

SEQ ID NO: 23194 - RNA, 21 nt, synthetic construct
  source 1..21: mol_type = other RNA; note = Description of Artificial Sequence: Synthetic oligonucleotide
cgctcctccctgaccttcatt

SEQ ID NO: 23195 - RNA, 21 nt, synthetic construct
  source 1..21: mol_type = other RNA; note = Description of Artificial Sequence: Synthetic oligonucleotide
gctcctccctgaccttccatt

SEQ ID NO: 23196 - RNA, 21 nt, synthetic construct
  source 1..21: mol_type = other RNA; note = Description of Artificial Sequence: Synthetic oligonucleotide
ctcctccctgaccttcctatt

SEQ ID NO: 23197 - RNA, 21 nt, synthetic construct
  source 1..21: mol_type = other RNA; note = Description of Artificial Sequence: Synthetic oligonucleotide
tcctccctgaccttcctcatt

SEQ ID NO: 23198 - RNA, 21 nt, synthetic construct
  source 1..21: mol_type = other RNA; note = Description of Artificial Sequence: Synthetic oligonucleotide
cctccctgaccttcctccatt

SEQ ID NO: 23199 - RNA, 21 nt, synthetic construct
  source 1..21: mol_type = other RNA; note = Description of Artificial Sequence: Synthetic oligonucleotide
ctccctgaccttcctcccatt

SEQ ID NO: 23200 - RNA, 21 nt, synthetic construct
  source 1..21: mol_type = other RNA; note = Description of Artificial Sequence: Synthetic oligonucleotide
tccctgaccttcctccccatt

SEQ ID NO: 23201 - RNA, 21 nt, synthetic construct
  source 1..21: mol_type = other RNA; note = Description of Artificial Sequence: Synthetic oligonucleotide
ccctgaccttcctcccctatt

SEQ ID NO: 23202 - RNA, 21 nt, synthetic construct
  source 1..21: mol_type = other RNA; note = Description of Artificial Sequence: Synthetic oligonucleotide
cctgaccttcctcccctcatt

SEQ ID NO: 23203 - RNA, 21 nt, synthetic construct
  source 1..21: mol_type = other RNA; note = Description of Artificial Sequence: Synthetic oligonucleotide
ctgaccttcctcccctccatt

SEQ ID NO: 23204 - RNA, 21 nt, synthetic construct
  source 1..21: mol_type = other RNA; note = Description of Artificial Sequence: Synthetic oligonucleotide
tgaccttcctcccctcccatt

SEQ ID NO: 23205 - RNA, 21 nt, synthetic construct
  source 1..21: mol_type = other RNA; note = Description of Artificial Sequence: Synthetic oligonucleotide
gaccttcctcccctccccatt

SEQ ID NO: 23206 - RNA, 21 nt, synthetic construct
  source 1..21: mol_type = other RNA; note = Description of Artificial Sequence: Synthetic oligonucleotide
accttcctcccctcccctatt

SEQ ID NO: 23207 - RNA, 21 nt, synthetic construct
  source 1..21: mol_type = other RNA; note = Description of Artificial Sequence: Synthetic oligonucleotide
ccttcctcccctccccttatt

SEQ ID NO: 23208 - RNA, 21 nt, synthetic construct
  source 1..21: mol_type = other RNA; note = Description of Artificial Sequence: Synthetic oligonucleotide
cttcctcccctcccctttatt

SEQ ID NO: 23209 - RNA, 21 nt, synthetic construct
  source 1..21: mol_type = other RNA; note = Description of Artificial Sequence: Synthetic oligonucleotide
ttcctcccctcccctttcatt

SEQ ID NO: 23210 - RNA, 21 nt, synthetic construct
  source 1..21: mol_type = other RNA; note = Description of Artificial Sequence: Synthetic oligonucleotide
tcctcccctcccctttcaatt

SEQ ID NO: 23211 - RNA, 21 nt, synthetic construct
  source 1..21: mol_type = other RNA; note = Description of Artificial Sequence: Synthetic oligonucleotide
cctcccctcccctttcacatt

SEQ ID NO: 23212 - RNA, 21 nt, synthetic construct
  source 1..21: mol_type = other RNA; note = Description of Artificial Sequence: Synthetic oligonucleotide
ctcccctcccctttcactatt

SEQ ID NO: 23213 - RNA, 21 nt, synthetic construct
  source 1..21: mol_type = other RNA; note = Description of Artificial Sequence: Synthetic oligonucleotide
tcccctcccctttcactcatt

SEQ ID NO: 23214 - RNA, 21 nt, synthetic construct
  source 1..21: mol_type = other RNA; note = Description of Artificial Sequence: Synthetic oligonucleotide
cccctcccctttcactcaatt

SEQ ID NO: 23215 - RNA, 21 nt, synthetic construct
  source 1..21: mol_type = other RNA; note = Description of Artificial Sequence: Synthetic oligonucleotide
ccctcccctttcactcaaatt

SEQ ID NO: 23216 - RNA, 21 nt, synthetic construct
  source 1..21: mol_type = other RNA; note = Description of Artificial Sequence: Synthetic oligonucleotide
cctcccctttcactcaatatt

SEQ ID NO: 23217 - RNA, 21 nt, synthetic construct
  source 1..21: mol_type = other RNA; note = Description of Artificial Sequence: Synthetic oligonucleotide
ctcccctttcactcaattatt

SEQ ID NO: 23218 - RNA, 21 nt, synthetic construct
  source 1..21: mol_type = other RNA; note = Description of Artificial Sequence: Synthetic oligonucleotide
tcccctttcactcaattcatt

SEQ ID NO: 23219 - RNA, 21 nt, synthetic construct
  source 1..21: mol_type = other RNA; note = Description of Artificial Sequence: Synthetic oligonucleotide
cccctttcactcaattctatt

SEQ ID NO: 23220 - RNA, 21 nt, synthetic construct
  source 1..21: mol_type = other RNA; note = Description of Artificial Sequence: Synthetic oligonucleotide
ccctttcactcaattctcatt

SEQ ID NO: 23221 - RNA, 21 nt, synthetic construct
  source 1..21: mol_type = other RNA; note = Description of Artificial Sequence: Synthetic oligonucleotide
cctttcactcaattctcaatt

SEQ ID NO: 23222 - RNA, 21 nt, synthetic construct
  source 1..21: mol_type = other RNA; note = Description of Artificial Sequence: Synthetic oligonucleotide
ctttcactcaattctcacatt

SEQ ID NO: 23223 - RNA, 21 nt, synthetic construct
  source 1..21: mol_type = other RNA; note = Description of Artificial Sequence: Synthetic oligonucleotide
tttcactcaattctcaccatt

SEQ ID NO: 23224 - RNA, 21 nt, synthetic construct
  source 1..21: mol_type = other RNA; note = Description of Artificial Sequence: Synthetic oligonucleotide
ttcactcaattctcaccaatt

SEQ ID NO: 23225 - RNA, 21 nt, synthetic construct
  source 1..21: mol_type = other RNA; note = Description of Artificial Sequence: Synthetic oligonucleotide
tcactcaattctcaccaaatt

SEQ ID NO: 23226 - RNA, 21 nt, synthetic construct
  source 1..21: mol_type = other RNA; note = Description of Artificial Sequence: Synthetic oligonucleotide
cactcaattctcaccaacatt

SEQ ID NO: 23227 - RNA, 21 nt, synthetic construct
  source 1..21: mol_type = other RNA; note = Description of Artificial Sequence: Synthetic oligonucleotide
actcaattctcaccaactatt

SEQ ID NO: 23228 - RNA, 21 nt, synthetic construct
  source 1..21: mol_type = other RNA; note = Description of Artificial Sequence: Synthetic oligonucleotide
ctcaattctcaccaactcatt

SEQ ID NO: 23229 - RNA, 21 nt, synthetic construct
  source 1..21: mol_type = other RNA; note = Description of Artificial Sequence: Synthetic oligonucleotide
tcaattctcaccaactctatt

SEQ ID NO: 23230 - RNA, 21 nt, synthetic construct
  source 1..21: mol_type = other RNA; note = Description of Artificial Sequence: Synthetic oligonucleotide
caattctcaccaactcttatt

SEQ ID NO: 23231 - RNA, 21 nt, synthetic construct
  source 1..21: mol_type = other RNA; note = Description of Artificial Sequence: Synthetic oligonucleotide
aattctcaccaactctttatt

SEQ ID NO: 23232 - RNA, 21 nt, synthetic construct
  source 1..21: mol_type = other RNA; note = Description of Artificial Sequence: Synthetic oligonucleotide
attctcaccaactctttcatt

SEQ ID NO: 23233 - RNA, 21 nt, synthetic construct
  source 1..21: mol_type = other RNA; note = Description of Artificial Sequence: Synthetic oligonucleotide
ttctcaccaactctttctatt

SEQ ID NO: 23234 - RNA, 21 nt, synthetic construct
  source 1..21: mol_type = other RNA; note = Description of Artificial Sequence: Synthetic oligonucleotide
tctcaccaactctttctcatt

SEQ ID NO: 23235 - RNA, 21 nt, synthetic construct
  source 1..21: mol_type = other RNA; note = Description of Artificial Sequence: Synthetic oligonucleotide
ctcaccaactctttctctatt

SEQ ID NO: 23236 - RNA, 21 nt, synthetic construct
  source 1..21: mol_type = other RNA; note = Description of Artificial Sequence: Synthetic oligonucleotide
tcaccaactctttctctcatt

SEQ ID NO: 23237 - RNA, 21 nt, synthetic construct
  source 1..21: mol_type = other RNA; note = Description of Artificial Sequence: Synthetic oligonucleotide
caccaactctttctctctatt

SEQ ID NO: 23238 - RNA, 21 nt, synthetic construct
  source 1..21: mol_type = other RNA; note = Description of Artificial Sequence: Synthetic oligonucleotide
accaactctttctctctcatt

SEQ ID NO: 23239 - RNA, 21 nt, synthetic construct
  source 1..21: mol_type = other RNA; note = Description of Artificial Sequence: Synthetic oligonucleotide
ccaactctttctctctctatt

SEQ ID NO: 23240 - RNA, 21 nt, synthetic construct
  source 1..21: mol_type = other RNA; note = Description of Artificial Sequence: Synthetic oligonucleotide
caactctttctctctctgatt

SEQ ID NO: 23241 - RNA, 21 nt, synthetic construct
  source 1..21: mol_type = other RNA; note = Description of Artificial Sequence: Synthetic oligonucleotide
aactctttctctctctggatt

SEQ ID NO: 23242 - RNA, 21 nt, synthetic construct
  source 1..21: mol_type = other RNA; note = Description of Artificial Sequence: Synthetic oligonucleotide
actctttctctctctggtatt

SEQ ID NO: 23243 - RNA, 21 nt, synthetic construct
  source 1..21: mol_type = other RNA; note = Description of Artificial Sequence: Synthetic oligonucleotide
ctctttctctctctggtgatt

SEQ ID NO: 23244 - RNA, 21 nt, synthetic construct
  source 1..21: mol_type = other RNA; note = Description of Artificial Sequence: Synthetic oligonucleotide
tctttctctctctggtgtatt

SEQ ID NO: 23245 - RNA, 21 nt, synthetic construct
  source 1..21: mol_type = other RNA; note = Description of Artificial Sequence: Synthetic oligonucleotide
ctttctctctctggtgttatt

SEQ ID NO: 23246 - RNA, 21 nt, synthetic construct
  source 1..21: mol_type = other RNA; note = Description of Artificial Sequence: Synthetic oligonucleotide
tttctctctctggtgtttatt

SEQ ID NO: 23247 - RNA, 21 nt, synthetic construct
  source 1..21: mol_type = other RNA; note = Description of Artificial Sequence: Synthetic oligonucleotide
ttctctctctggtgttttatt

SEQ ID NO: 23248 - RNA, 21 nt, synthetic construct
  source 1..21: mol_type = other RNA; note = Description of Artificial Sequence: Synthetic oligonucleotide
tctctctctggtgttttcatt

SEQ ID NO: 23249 - RNA, 21 nt, synthetic construct
  source 1..21: mol_type = other RNA; note = Description of Artificial Sequence: Synthetic oligonucleotide
ctctctctggtgttttctatt

SEQ ID NO: 23250 - RNA, 21 nt, synthetic construct
  source 1..21: mol_type = other RNA; note = Description of Artificial Sequence: Synthetic oligonucleotide
tctctctggtgttttctcatt

SEQ ID NO: 23251 - RNA, 21 nt, synthetic construct
  source 1..21: mol_type = other RNA; note = Description of Artificial Sequence: Synthetic oligonucleotide
ctctctggtgttttctccatt

SEQ ID NO: 23252 - RNA, 21 nt, synthetic construct
  source 1..21: mol_type = other RNA; note = Description of Artificial Sequence: Synthetic oligonucleotide
tctctggtgttttctcctatt

SEQ ID NO: 23253 - RNA, 21 nt, synthetic construct
  source 1..21: mol_type = other RNA; note = Description of Artificial Sequence: Synthetic oligonucleotide
ctctggtgttttctccttatt

SEQ ID NO: 23254 - RNA, 21 nt, synthetic construct
  source 1..21: mol_type = other RNA; note = Description of Artificial Sequence: Synthetic oligonucleotide
tctggtgttttctcctttatt

SEQ ID NO: 23255 - RNA, 21 nt, synthetic construct
  source 1..21: mol_type = other RNA; note = Description of Artificial Sequence: Synthetic oligonucleotide
ctggtgttttctccttttatt

SEQ ID NO: 23256 - RNA, 21 nt, synthetic construct
  source 1..21: mol_type = other RNA; note = Description of Artificial Sequence: Synthetic oligonucleotide
tggtgttttctccttttcatt

SEQ ID NO: 23257 - RNA, 21 nt, synthetic construct
  source 1..21: mol_type = other RNA; note = Description of Artificial Sequence: Synthetic oligonucleotide
ggtgttttctccttttctatt

SEQ ID NO: 23258 - RNA, 21 nt, synthetic construct
  source 1..21: mol_type = other RNA; note = Description of Artificial Sequence: Synthetic oligonucleotide
gtgttttctccttttctcatt

SEQ ID NO: 23259 - RNA, 21 nt, synthetic construct
  source 1..21: mol_type = other RNA; note = Description of Artificial Sequence: Synthetic oligonucleotide
tgttttctccttttctcgatt

SEQ ID NO: 23260 - RNA, 21 nt, synthetic construct
  source 1..21: mol_type = other RNA; note = Description of Artificial Sequence: Synthetic oligonucleotide
gttttctccttttctcgtatt

SEQ ID NO: 23261 - RNA, 21 nt, synthetic construct
  source 1..21: mol_type = other RNA; note = Description of Artificial Sequence: Synthetic oligonucleotide
ttttctccttttctcgtaatt

SEQ ID NO: 23262 - RNA, 21 nt, synthetic construct
  source 1..21: mol_type = other RNA; note = Description of Artificial Sequence: Synthetic oligonucleotide
tttctccttttctcgtaaatt

SEQ ID NO: 23263 - RNA, 21 nt, synthetic construct
  source 1..21: mol_type = other RNA; note = Description of Artificial Sequence: Synthetic oligonucleotide
ttctccttttctcgtaaaatt

SEQ ID NO: 23264 - RNA, 21 nt, synthetic construct
  source 1..21: mol_type = other RNA; note = Description of Artificial Sequence: Synthetic oligonucleotide
tctccttttctcgtaaacatt

SEQ ID NO: 23265 - RNA, 21 nt, synthetic construct
  source 1..21: mol_type = other RNA; note = Description of Artificial Sequence: Synthetic oligonucleotide
ctccttttctcgtaaactatt

SEQ ID NO: 23266 - RNA, 21 nt, synthetic construct
  source 1..21: mol_type = other RNA; note = Description of Artificial Sequence: Synthetic oligonucleotide
tccttttctcgtaaacttatt

SEQ ID NO: 23267 - RNA, 21 nt, synthetic construct
  source 1..21: mol_type = other RNA; note = Description of Artificial Sequence: Synthetic oligonucleotide
ccttttctcgtaaactttatt

SEQ ID NO: 23268 - RNA, 21 nt, synthetic construct
  source 1..21: mol_type = other RNA; note = Description of Artificial Sequence: Synthetic oligonucleotide
cttttctcgtaaactttgatt

SEQ ID NO: 23269 - RNA, 21 nt, synthetic construct
  source 1..21: mol_type = other RNA; note = Description of Artificial Sequence: Synthetic oligonucleotide
ttttctcgtaaactttgcatt

SEQ ID NO: 23270 - RNA, 21 nt, synthetic construct
  source 1..21: mol_type = other RNA; note = Description of Artificial Sequence: Synthetic oligonucleotide
tttctcgtaaactttgccatt

SEQ ID NO: 23271 - RNA, 21 nt, synthetic construct
  source 1..21: mol_type = other RNA; note = Description of Artificial Sequence: Synthetic oligonucleotide
ttctcgtaaactttgccgatt

SEQ ID NO: 23272 - RNA, 21 nt, synthetic construct
  source 1..21: mol_type = other RNA; note = Description of Artificial Sequence: Synthetic oligonucleotide
tctcgtaaactttgccgcatt

SEQ ID NO: 23273 - RNA, 21 nt, synthetic construct
  source 1..21: mol_type = other RNA; note = Description of Artificial Sequence: Synthetic oligonucleotide
ctcgtaaactttgccgccatt

SEQ ID NO: 23274 - RNA, 21 nt, synthetic construct
  source 1..21: mol_type = other RNA; note = Description of Artificial Sequence: Synthetic oligonucleotide
tcgtaaactttgccgcctatt

SEQ ID NO: 23275 - RNA, 21 nt, synthetic construct
  source 1..21: mol_type = other RNA; note = Description of Artificial Sequence: Synthetic oligonucleotide
cgtaaactttgccgcctaatt

SEQ ID NO: 23276 - RNA, 21 nt, synthetic construct
  source 1..21: mol_type = other RNA; note = Description of Artificial Sequence: Synthetic oligonucleotide
gtaaactttgccgcctatatt

SEQ ID NO: 23277 - RNA, 21 nt, synthetic construct
  source 1..21: mol_type = other RNA; note = Description of Artificial Sequence: Synthetic oligonucleotide
taaactttgccgcctatgatt

SEQ ID NO: 23278 - RNA, 21 nt, synthetic construct
  source 1..21: mol_type = other RNA; note = Description of Artificial Sequence: Synthetic oligonucleotide
aaactttgccgcctatgaatt

SEQ ID NO: 23279 - RNA, 21 nt, synthetic construct
  source 1..21: mol_type = other RNA; note = Description of Artificial Sequence: Synthetic oligonucleotide
aactttgccgcctatgagatt

SEQ ID NO: 23280 - RNA, 21 nt, synthetic construct
  source 1..21: mol_type = other RNA; note = Description of Artificial Sequence: Synthetic oligonucleotide
actttgccgcctatgagcatt

SEQ ID NO: 23281 - RNA, 21 nt, synthetic construct
  source 1..21: mol_type = other RNA; note = Description of Artificial Sequence: Synthetic oligonucleotide
ctttgccgcctatgagcaatt

SEQ ID NO: 23282 - RNA, 21 nt, synthetic construct
  source 1..21: mol_type = other RNA; note = Description of Artificial Sequence: Synthetic oligonucleotide
tttgccgcctatgagcagatt

SEQ ID NO: 23283 - RNA, 21 nt, synthetic construct
  source 1..21: mol_type = other RNA; note = Description of Artificial Sequence: Synthetic oligonucleotide
ttgccgcctatgagcagcatt

SEQ ID NO: 23284 - RNA, 21 nt, synthetic construct
  source 1..21: mol_type = other RNA; note = Description of Artificial Sequence: Synthetic oligonucleotide
tgccgcctatgagcagccatt

SEQ ID NO: 23285 - RNA, 21 nt, synthetic construct
  source 1..21: mol_type = other RNA; note = Description of Artificial Sequence: Synthetic oligonucleotide
gccgcctatgagcagccaatt

SEQ ID NO: 23286 - RNA, 21 nt, synthetic construct
  source 1..21: mol_type = other RNA; note = Description of Artificial Sequence: Synthetic oligonucleotide
ccgcctatgagcagccacatt

SEQ ID NO: 23287 - RNA, 21 nt, synthetic construct
  source 1..21: mol_type = other RNA; note = Description of Artificial Sequence: Synthetic oligonucleotide
cgcctatgagcagccacaatt

SEQ ID NO: 23288 - RNA, 21 nt, synthetic construct
  source 1..21: mol_type = other RNA; note = Description of Artificial Sequence: Synthetic oligonucleotide
gcctatgagcagccacatatt

SEQ ID NO: 23289 - RNA, 21 nt, synthetic construct
  source 1..21: mol_type = other RNA; note = Description of Artificial Sequence: Synthetic oligonucleotide
cctatgagcagccacattatt

SEQ ID NO: 23290 - RNA, 21 nt, synthetic construct
  source 1..21: mol_type = other RNA; note = Description of Artificial Sequence: Synthetic oligonucleotide
ctatgagcagccacattgatt

SEQ ID NO: 23291 - RNA, 21 nt, synthetic construct
  source 1..21: mol_type = other RNA; note = Description of Artificial Sequence: Synthetic oligonucleotide
tatgagcagccacattgcatt

SEQ ID NO: 23292 - RNA, 21 nt, synthetic construct
  source 1..21: mol_type = other RNA; note = Description of Artificial Sequence: Synthetic oligonucleotide
atgagcagccacattgccatt

SEQ ID NO: 23293 - RNA, 21 nt, synthetic construct
  source 1..21: mol_type = other RNA; note = Description of Artificial Sequence: Synthetic oligonucleotide
tgagcagccacattgcctatt

SEQ ID NO: 23294 - RNA, 21 nt, synthetic construct
  source 1..21: mol_type = other RNA; note = Description of Artificial Sequence: Synthetic oligonucleotide
gagcagccacattgccttatt

SEQ ID NO: 23295 - RNA, 21 nt, synthetic construct
  source 1..21: mol_type = other RNA; note = Description of Artificial Sequence: Synthetic oligonucleotide
agcagccacattgccttaatt

SEQ ID NO: 23296 - RNA, 21 nt, synthetic construct
  source 1..21: mol_type = other RNA; note = Description of Artificial Sequence: Synthetic oligonucleotide
gcagccacattgccttacatt

SEQ ID NO: 23297 - RNA, 21 nt, synthetic construct
  source 1..21: mol_type = other RNA; note = Description of Artificial Sequence: Synthetic oligonucleotide
cagccacattgccttactatt

SEQ ID NO: 23298 - RNA, 21 nt, synthetic construct
  source 1..21: mol_type = other RNA; note = Description of Artificial Sequence: Synthetic oligonucleotide
agccacattgccttactgatt

SEQ ID NO: 23299 - DNA, 20 bp, synthetic construct
  source 1..20: mol_type = other DNA; note = Description of Artificial Sequence: Synthetic oligonucleotide
taagttggagtctccctgat

SEQ ID NO: 23300 - DNA, 20 bp, synthetic construct
  source 1..20: mol_type = other DNA; note = Description of Artificial Sequence: Synthetic oligonucleotide
ttaagttggagtctccctga

SEQ ID NO: 23301 - DNA, 20 bp, synthetic construct
  source 1..20: mol_type = other DNA; note = Description of Artificial Sequence: Synthetic oligonucleotide
cttaagttggagtctccctg

SEQ ID NO: 23302 - DNA, 20 bp, synthetic construct
  source 1..20: mol_type = other DNA; note = Description of Artificial Sequence: Synthetic oligonucleotide
ccttaagttggagtctccct

SEQ ID NO: 23303 - DNA, 20 bp, synthetic construct
  source 1..20: mol_type = other DNA; note = Description of Artificial Sequence: Synthetic oligonucleotide
gccttaagttggagtctccc

SEQ ID NO: 23304 - DNA, 20 bp, synthetic construct
  source 1..20: mol_type = other DNA; note = Description of Artificial Sequence: Synthetic oligonucleotide
tgccttaagttggagtctcc

SEQ ID NO: 23305 - DNA, 20 bp, synthetic construct
  source 1..20: mol_type = other DNA; note = Description of Artificial Sequence: Synthetic oligonucleotide
ttgccttaagttggagtctc

SEQ ID NO: 23306 - DNA, 20 bp, synthetic construct
  source 1..20: mol_type = other DNA; note = Description of Artificial Sequence: Synthetic oligonucleotide
gttgccttaagttggagtct

SEQ ID NO: 23307 - DNA, 20 bp, synthetic construct
  source 1..20: mol_type = other DNA; note = Description of Artificial Sequence: Synthetic oligonucleotide
tgttgccttaagttggagtc

SEQ ID NO: 23308 - DNA, 20 bp, synthetic construct
  source 1..20: mol_type = other DNA; note = Description of Artificial Sequence: Synthetic oligonucleotide
ctgttgccttaagttggagt

SEQ ID NO: 23309 - DNA, 20 bp, synthetic construct
  source 1..20: mol_type = other DNA; note = Description of Artificial Sequence: Synthetic oligonucleotide
gctgttgccttaagttggag

SEQ ID NO: 23310 - DNA, 20 bp, synthetic construct
  source 1..20: mol_type = other DNA; note = Description of Artificial Sequence: Synthetic oligonucleotide
tgctgttgccttaagttgga

SEQ ID NO: 23311 - DNA, 20 bp, synthetic construct
  source 1..20: mol_type = other DNA; note = Description of Artificial Sequence: Synthetic oligonucleotide
atgctgttgccttaagttgg

SEQ ID NO: 23312 - DNA, 20 bp, synthetic construct
  source 1..20: mol_type = other DNA; note = Description of Artificial Sequence: Synthetic oligonucleotide
catgctgttgccttaagttg

SEQ ID NO: 23313 - DNA, 20 bp, synthetic construct
  source 1..20: mol_type = other DNA; note = Description of Artificial Sequence: Synthetic oligonucleotide
ccatgctgttgccttaagtt

SEQ ID NO: 23314 - DNA, 20 bp, synthetic construct
  source 1..20: mol_type = other DNA; note = Description of Artificial Sequence: Synthetic oligonucleotide
cccatgctgttgccttaagt

SEQ ID NO: 23315 - DNA, 20 bp, synthetic construct
  source 1..20: mol_type = other DNA; note = Description of Artificial Sequence: Synthetic oligonucleotide
acccatgctgttgccttaag

SEQ ID NO: 23316 - DNA, 20 bp, synthetic construct
  source 1..20: mol_type = other DNA; note = Description of Artificial Sequence: Synthetic oligonucleotide
cacccatgctgttgccttaa

SEQ ID NO: 23317 - DNA, 20 bp, synthetic construct
  source 1..20: mol_type = other DNA; note = Description of Artificial Sequence: Synthetic oligonucleotide
tcacccatgctgttgcctta

SEQ ID NO: 23318 - DNA, 20 bp, synthetic construct
  source 1..20: mol_type = other DNA; note = Description of Artificial Sequence: Synthetic oligonucleotide
ttcacccatgctgttgcctt

SEQ ID NO: 23319 - DNA, 20 bp, synthetic construct
  source 1..20: mol_type = other DNA; note = Description of Artificial Sequence: Synthetic oligonucleotide
attcacccatgctgttgcct

SEQ ID NO: 23320 - DNA, 20 bp, synthetic construct
  source 1..20: mol_type = other DNA; note = Description of Artificial Sequence: Synthetic oligonucleotide
tattcacccatgctgttgcc

SEQ ID NO: 23321 - DNA, 20 bp, synthetic construct
  source 1..20: mol_type = other DNA; note = Description of Artificial Sequence: Synthetic oligonucleotide
ttattcacccatgctgttgc

SEQ ID NO: 23322 - DNA, 20 bp, synthetic construct
  source 1..20: mol_type = other DNA; note = Description of Artificial Sequence: Synthetic oligonucleotide
cttattcacccatgctgttg

SEQ ID NO: 23323 - DNA, 20 bp, synthetic construct
  source 1..20: mol_type = other DNA; note = Description of Artificial Sequence: Synthetic oligonucleotide
ccttattcacccatgctgtt

SEQ ID NO: 23324 - DNA, 20 bp, synthetic construct
  source 1..20: mol_type = other DNA; note = Description of Artificial Sequence: Synthetic oligonucleotide
cccttattcacccatgctgt

SEQ ID NO: 23325 - DNA, 20 bp, synthetic construct
  source 1..20: mol_type = other DNA; note = Description of Artificial Sequence: Synthetic oligonucleotide
gcccttattcacccatgctg

SEQ ID NO: 23326 - DNA, 20 bp, synthetic construct
  source 1..20: mol_type = other DNA; note = Description of Artificial Sequence: Synthetic oligonucleotide
agcccttattcacccatgct

SEQ ID NO: 23327 - DNA, 20 bp, synthetic construct
  source 1..20: mol_type = other DNA; note = Description of Artificial Sequence: Synthetic oligonucleotide
aagcccttattcacccatgc

SEQ ID NO: 23328 - DNA, 20 bp, synthetic construct
  source 1..20: mol_type = other DNA; note = Description of Artificial Sequence: Synthetic oligonucleotide
gaagcccttattcacccatg

SEQ ID NO: 23329 - DNA, 20 bp, synthetic construct
  source 1..20: mol_type = other DNA; note = Description of Artificial Sequence: Synthetic oligonucleotide
ggaagcccttattcacccat

SEQ ID NO: 23330 - DNA, 20 bp, synthetic construct
  source 1..20: mol_type = other DNA; note = Description of Artificial Sequence: Synthetic oligonucleotide
aggaagcccttattcaccca

SEQ ID NO: 23331 - DNA, 20 bp, synthetic construct
  source 1..20: mol_type = other DNA; note = Description of Artificial Sequence: Synthetic oligonucleotide
caggaagcccttattcaccc

SEQ ID NO: 23332 - DNA, 20 bp, synthetic construct
  source 1..20: mol_type = other DNA; note = Description of Artificial Sequence: Synthetic oligonucleotide
acaggaagcccttattcacc

SEQ ID NO: 23333 - DNA, 20 bp, synthetic construct
  source 1..20: mol_type = other DNA; note = Description of Artificial Sequence: Synthetic oligonucleotide
cacaggaagcccttattcac

SEQ ID NO: 23334 - DNA, 20 bp, synthetic construct
  source 1..20: mol_type = other DNA; note = Description of Artificial Sequence: Synthetic oligonucleotide
ccacaggaagcccttattca

SEQ ID NO: 23335 - DNA, 20 bp, synthetic construct
  source 1..20: mol_type = other DNA; note = Description of Artificial Sequence: Synthetic oligonucleotide
tccacaggaagcccttattc

SEQ ID NO: 23336 - DNA, 20 bp, synthetic construct
  source 1..20: mol_type = other DNA; note = Description of Artificial Sequence: Synthetic oligonucleotide
gtccacaggaagcccttatt

SEQ ID NO: 23337 - DNA, 20 bp, synthetic construct
  source 1..20: mol_type = other DNA; note = Description of Artificial Sequence: Synthetic oligonucleotide
agtccacaggaagcccttat

SEQ ID NO: 23338 - DNA, 20 bp, synthetic construct
  source 1..20: mol_type = other DNA; note = Description of Artificial Sequence: Synthetic oligonucleotide
cagtccacaggaagccctta

SEQ ID NO: 23339 - DNA, 20 bp, synthetic construct
  source 1..20: mol_type = other DNA; note = Description of Artificial Sequence: Synthetic oligonucleotide
ccagtccacaggaagccctt

SEQ ID NO: 23340 - DNA, 20 bp, synthetic construct
  source 1..20: mol_type = other DNA; note = Description of Artificial Sequence: Synthetic oligonucleotide
gccagtccacaggaagccct

SEQ ID NO: 23341 - DNA, 20 bp, synthetic construct
  source 1..20: mol_type = other DNA; note = Description of Artificial Sequence: Synthetic oligonucleotide
tgccagtccacaggaagccc

SEQ ID NO: 23342 - DNA, 20 bp, synthetic construct
  source 1..20: mol_type = other DNA; note = Description of Artificial Sequence: Synthetic oligonucleotide
ttgccagtccacaggaagcc

SEQ ID NO: 23343 - DNA, 20 bp, synthetic construct
  source 1..20: mol_type = other DNA; note = Description of Artificial Sequence: Synthetic oligonucleotide
attgccagtccacaggaagc

SEQ ID NO: 23344 - DNA, 20 bp, synthetic construct
  source 1..20: mol_type = other DNA; note = Description of Artificial Sequence: Synthetic oligonucleotide
cattgccagtccacaggaag

SEQ ID NO: 23345 - DNA, 20 bp, synthetic construct
  source 1..20: mol_type = other DNA; note = Description of Artificial Sequence: Synthetic oligonucleotide
tcattgccagtccacaggaa

SEQ ID NO: 23346 - DNA, 20 bp, synthetic construct
  source 1..20: mol_type = other DNA; note = Description of Artificial Sequence: Synthetic oligonucleotide
ctcattgccagtccacagga

SEQ ID NO: 23347 - DNA, 20 bp, synthetic construct
  source 1..20: mol_type = other DNA; note = Description of Artificial Sequence: Synthetic oligonucleotide
tctcattgccagtccacagg

SEQ ID NO: 23348 - DNA, 20 bp, synthetic construct
  source 1..20: mol_type = other DNA; note = Description of Artificial Sequence: Synthetic oligonucleotide
ctctcattgccagtccacag

SEQ ID NO: 23349 - DNA, 20 bp, synthetic construct
  source 1..20: mol_type = other DNA; note = Description of Artificial Sequence: Synthetic oligonucleotide
cctctcattgccagtccaca

SEQ ID NO: 23350 - DNA, 20 bp, synthetic construct
  source 1..20: mol_type = other DNA; note = Description of Artificial Sequence: Synthetic oligonucleotide
gcctctcattgccagtccac

SEQ ID NO: 23351 - DNA, 20 bp, synthetic construct
  source 1..20: mol_type = other DNA; note = Description of Artificial Sequence: Synthetic oligonucleotide
tgcctctcattgccagtcca

SEQ ID NO: 23352 - DNA, 20 bp, synthetic construct
  source 1..20: mol_type = other DNA; note = Description of Artificial Sequence: Synthetic oligonucleotide
ttgcctctcattgccagtcc

SEQ ID NO: 23353 - DNA, 20 bp, synthetic construct
  source 1..20: mol_type = other DNA; note = Description of Artificial Sequence: Synthetic oligonucleotide
tttgcctctcattgccagtc

SEQ ID NO: 23354 - DNA, 20 bp, synthetic construct
  source 1..20: mol_type = other DNA; note = Description of Artificial Sequence: Synthetic oligonucleotide
ttttgcctctcattgccagt

SEQ ID NO: 23355 - DNA, 20 bp, synthetic construct
  source 1..20: mol_type = other DNA; note = Description of Artificial Sequence: Synthetic oligonucleotide
gttttgcctctcattgccag

SEQ ID NO: 23356 - DNA, 20 bp, synthetic construct
  source 1..20: mol_type = other DNA; note = Description of Artificial Sequence: Synthetic oligonucleotide
ggttttgcctctcattgcca

SEQ ID NO: 23357 - DNA, 20 bp, synthetic construct
  source 1..20: mol_type = other DNA; note = Description of Artificial Sequence: Synthetic oligonucleotide
aggttttgcctctcattgcc

SEQ ID NO: 23358 - DNA, 20 bp, synthetic construct
  source 1..20: mol_type = other DNA; note = Description of Artificial Sequence: Synthetic oligonucleotide
caggttttgcctctcattgc

SEQ ID NO: 23359 - DNA, 20 bp, synthetic construct
  source 1..20: mol_type = other DNA; note = Description of Artificial Sequence: Synthetic oligonucleotide
ccaggttttgcctctcattg

SEQ ID NO: 23360 - DNA, 20 bp, synthetic construct
  source 1..20: mol_type = other DNA; note = Description of Artificial Sequence: Synthetic oligonucleotide
accaggttttgcctctcatt

SEQ ID NO: 23361 - DNA, 20 bp, synthetic construct
  source 1..20: mol_type = other DNA; note = Description of Artificial Sequence: Synthetic oligonucleotide
caccaggttttgcctctcat

SEQ ID NO: 23362 - DNA, 20 bp, synthetic construct
  source 1..20: mol_type = other DNA; note = Description of Artificial Sequence: Synthetic oligonucleotide
gcaccaggttttgcctctca

SEQ ID NO: 23363 - DNA, 20 bp, synthetic construct
  source 1..20: mol_type = other DNA; note = Description of Artificial Sequence: Synthetic oligonucleotide
agcaccaggttttgcctctc

SEQ ID NO: 23364 - DNA, 20 bp, synthetic construct
  source 1..20: mol_type = other DNA; note = Description of Artificial Sequence: Synthetic oligonucleotide
aagcaccaggttttgcctct

SEQ ID NO: 23365 - DNA, 20 bp, synthetic construct
  source 1..20: mol_type = other DNA; note = Description of Artificial Sequence: Synthetic oligonucleotide
caagcaccaggttttgcctc

SEQ ID NO: 23366 - DNA, 20 bp, synthetic construct
  source 1..20: mol_type = other DNA; note = Description of Artificial Sequence: Synthetic oligonucleotide
tcaagcaccaggttttgcct

SEQ ID NO: 23367 - DNA, 20 bp, synthetic construct
  source 1..20: mol_type = other DNA; note = Description of Artificial Sequence: Synthetic oligonucleotide
ctcaagcaccaggttttgcc

SEQ ID NO: 23368 - DNA, 20 bp, synthetic construct
  source 1..20: mol_type = other DNA; note = Description of Artificial Sequence: Synthetic oligonucleotide
gctcaagcaccaggttttgc

SEQ ID NO: 23369 - DNA, 20 bp, synthetic construct
  source 1..20: mol_type = other DNA; note = Description of Artificial Sequence: Synthetic oligonucleotide
tgctcaagcaccaggttttg

SEQ ID NO: 23370 - DNA, 20 bp, synthetic construct
  source 1..20: mol_type = other DNA; note = Description of Artificial Sequence: Synthetic oligonucleotide
gtgctcaagcaccaggtttt

SEQ ID NO: 23371 - DNA, 20 bp, synthetic construct
  source 1..20: mol_type = other DNA; note = Description of Artificial Sequence: Synthetic oligonucleotide
agtgctcaagcaccaggttt

SEQ ID NO: 23372 - DNA, 20 bp, synthetic construct
  source 1..20: mol_type = other DNA; note = Description of Artificial Sequence: Synthetic oligonucleotide
cagtgctcaagcaccaggtt

SEQ ID NO: 23373 - DNA, 20 bp, synthetic construct
  source 1..20: mol_type = other DNA; note = Description of Artificial Sequence: Synthetic oligonucleotide
ccagtgctcaagcaccaggt

SEQ ID NO: 23374 - DNA, 20 bp, synthetic construct
  source 1..20: mol_type = other DNA; note = Description of Artificial Sequence: Synthetic oligonucleotide
gccagtgctcaagcaccagg

SEQ ID NO: 23375 - DNA, 20 bp, synthetic construct
  source 1..20: mol_type = other DNA; note = Description of Artificial Sequence: Synthetic oligonucleotide
ggccagtgctcaagcaccag

SEQ ID NO: 23376 - DNA, 20 bp, synthetic construct
  source 1..20: mol_type = other DNA; note = Description of Artificial Sequence: Synthetic oligonucleotide
gggccagtgctcaagcacca

SEQ ID NO: 23377 - DNA, 20 bp, synthetic construct
  source 1..20: mol_type = other DNA; note = Description of Artificial Sequence: Synthetic oligonucleotide
ggggccagtgctcaagcacc

SEQ ID NO: 23378 - DNA, 20 bp, synthetic construct
  source 1..20: mol_type = other DNA; note = Description of Artificial Sequence: Synthetic oligonucleotide
aggggccagtgctcaagcac

SEQ ID NO: 23379 - DNA, 20 bp, synthetic construct
  source 1..20: mol_type = other DNA; note = Description of Artificial Sequence: Synthetic oligonucleotide
taggggccagtgctcaagca

SEQ ID NO: 23380 - DNA, 20 bp, synthetic construct
  source 1..20: mol_type = other DNA; note = Description of Artificial Sequence: Synthetic oligonucleotide
ttaggggccagtgctcaagc

SEQ ID NO: 23381 - DNA, 20 bp, synthetic construct
  source 1..20: mol_type = other DNA; note = Description of Artificial Sequence: Synthetic oligonucleotide
cttaggggccagtgctcaag

SEQ ID NO: 23382 - DNA, 20 bp, synthetic construct
  source 1..20: mol_type = other DNA; note = Description of Artificial Sequence: Synthetic oligonucleotide
ccttaggggccagtgctcaa

SEQ ID NO: 23383 - DNA, 20 bp, synthetic construct
  source 1..20: mol_type = other DNA; note = Description of Artificial Sequence: Synthetic oligonucleotide
gccttaggggccagtgctca

SEQ ID NO: 23384 - DNA, 20 bp, synthetic construct
  source 1..20: mol_type = other DNA; note = Description of Artificial Sequence: Synthetic oligonucleotide
tgccttaggggccagtgctc

SEQ ID NO: 23385 - DNA, 20 bp, synthetic construct
  source 1..20: mol_type = other DNA; note = Description of Artificial Sequence: Synthetic oligonucleotide
ctgccttaggggccagtgct

SEQ ID NO: 23386 - DNA, 20 bp, synthetic construct
  source 1..20: mol_type = other DNA; note = Description of Artificial Sequence: Synthetic oligonucleotide
cctgccttaggggccagtgc

SEQ ID NO: 23387 - DNA, 20 bp, synthetic construct
  source 1..20: mol_type = other DNA; note = Description of Artificial Sequence: Synthetic oligonucleotide
gcctgccttaggggccagtg

SEQ ID NO: 23388 - DNA, 20 bp, synthetic construct
  source 1..20: mol_type = other DNA; note = Description of Artificial Sequence: Synthetic oligonucleotide
ggcctgccttaggggccagt

SEQ ID NO: 23389 - DNA, 20 bp, synthetic construct
  source 1..20: mol_type = other DNA; note = Description of Artificial Sequence: Synthetic oligonucleotide
aggcctgccttaggggccag

SEQ ID NO: 23390 - DNA, 20 bp, synthetic construct
  source 1..20: mol_type = other DNA; note = Description of Artificial Sequence: Synthetic oligonucleotide
aaggcctgccttaggggcca

SEQ ID NO: 23391 - DNA, 20 bp, synthetic construct
  source 1..20: mol_type = other DNA; note = Description of Artificial Sequence: Synthetic oligonucleotide
taaggcctgccttaggggcc

SEQ ID NO: 23392 - DNA, 20 bp, synthetic construct
  source 1..20: mol_type = other DNA; note = Description of Artificial Sequence: Synthetic oligonucleotide
gtaaggcctgccttaggggc

SEQ ID NO: 23393 - DNA, 20 bp, synthetic construct
  source 1..20: mol_type = other DNA; note = Description of Artificial Sequence: Synthetic oligonucleotide
tgtaaggcctgccttagggg

SEQ ID NO: 23394 - DNA, 20 bp, synthetic construct
  source 1..20: mol_type = other DNA; note = Description of Artificial Sequence: Synthetic oligonucleotide
ctgtaaggcctgccttaggg

SEQ ID NO: 23395 - DNA, 20 bp, synthetic construct
  source 1..20: mol_type = other DNA; note = Description of Artificial Sequence: Synthetic oligonucleotide
tctgtaaggcctgccttagg

SEQ ID NO: 23396 - DNA, 20 bp, synthetic construct
  source 1..20: mol_type = other DNA; note = Description of Artificial Sequence: Synthetic oligonucleotide
atctgtaaggcctgccttag

SEQ ID NO: 23397 - DNA, 20 bp, synthetic construct
  source 1..20: mol_type = other DNA; note = Description of Artificial Sequence: Synthetic oligonucleotide
gatctgtaaggcctgcctta

SEQ ID NO: 23398 - DNA, 20 bp, synthetic construct
  source 1..20: mol_type = other DNA; note = Description of Artificial Sequence: Synthetic oligonucleotide
agatctgtaaggcctgcctt

SEQ ID NO: 23399 - DNA, 20 bp, synthetic construct
  source 1..20: mol_type = other DNA; note = Description of Artificial Sequence: Synthetic oligonucleotide
gagatctgtaaggcctgcct

SEQ ID NO: 23400 - DNA, 20 bp, synthetic construct
  source 1..20: mol_type = other DNA; note = Description of Artificial Sequence: Synthetic oligonucleotide
agagatctgtaaggcctgcc

SEQ ID NO: 23401 - DNA, 20 bp, synthetic construct
  source 1..20: mol_type = other DNA; note = Description of Artificial Sequence: Synthetic oligonucleotide
aagagatctgtaaggcctgc

SEQ ID NO: 23402 - DNA, 20 bp, synthetic construct
  source 1..20: mol_type = other DNA; note = Description of Artificial Sequence: Synthetic oligonucleotide
taagagatctgtaaggcctg

SEQ ID NO: 23403 - DNA, 20 bp, synthetic construct
  source 1..20: mol_type = other DNA; note = Description of Artificial Sequence: Synthetic oligonucleotide
gtaagagatctgtaaggcct

SEQ ID NO: 23404 - DNA, 20 bp, synthetic construct
  source 1..20: mol_type = other DNA; note = Description of Artificial Sequence: Synthetic oligonucleotide
tgtaagagatctgtaaggcc

SEQ ID NO: 23405 - DNA, 20 bp, synthetic construct
  source 1..20: mol_type = other DNA; note = Description of Artificial Sequence: Synthetic oligonucleotide
gtgtaagagatctgtaaggc

SEQ ID NO: 23406 - DNA, 20 bp, synthetic construct
  source 1..20: mol_type = other DNA; note = Description of Artificial Sequence: Synthetic oligonucleotide
agtgtaagagatctgtaagg

SEQ ID NO: 23407 - DNA, 20 bp, synthetic construct
  source 1..20: mol_type = other DNA; note = Description of Artificial Sequence: Synthetic oligonucleotide
gagtgtaagagatctgtaag

SEQ ID NO: 23408 - DNA, 20 bp, synthetic construct
  source 1..20: mol_type = other DNA; note = Description of Artificial Sequence: Synthetic oligonucleotide
cgagtgtaagagatctgtaa

SEQ ID NO: 23409 - DNA, 20 bp, synthetic construct
  source 1..20: mol_type = other DNA; note = Description of Artificial Sequence: Synthetic oligonucleotide
acgagtgtaagagatctgta

SEQ ID NO: 23410 - DNA, 20 bp, synthetic construct
  source 1..20: mol_type = other DNA; note = Description of Artificial Sequence: Synthetic oligonucleotide
cacgagtgtaagagatctgt

SEQ ID NO: 23411 - DNA, 20 bp, synthetic construct
  source 1..20: mol_type = other DNA; note = Description of Artificial Sequence: Synthetic oligonucleotide
ccacgagtgtaagagatctg

SEQ ID NO: 23412 - DNA, 20 bp, synthetic construct
  source 1..20: mol_type = other DNA; note = Description of Artificial Sequence: Synthetic oligonucleotide
accacgagtgtaagagatct

SEQ ID NO: 23413 - DNA, 20 bp, synthetic construct
  source 1..20: mol_type = other DNA; note = Description of Artificial Sequence: Synthetic oligonucleotide
caccacgagtgtaagagatc

SEQ ID NO: 23414 - DNA, 20 bp, synthetic construct
  source 1..20: mol_type = other DNA; note = Description of Artificial Sequence: Synthetic oligonucleotide
ccaccacgagtgtaagagat

SEQ ID NO: 23415 - DNA, 20 bp, synthetic construct
  source 1..20: mol_type = other DNA; note = Description of Artificial Sequence: Synthetic oligonucleotide
cccaccacgagtgtaagaga

SEQ ID NO: 23416 - DNA, 20 bp, synthetic construct
  source 1..20: mol_type = other DNA; note = Description of Artificial Sequence: Synthetic oligonucleotide
tcccaccacgagtgtaagag

SEQ ID NO: 23417 - DNA, 20 bp, synthetic construct
  source 1..20: mol_type = other DNA; note = Description of Artificial Sequence: Synthetic oligonucleotide
ttcccaccacgagtgtaaga

SEQ ID NO: 23418 - DNA, 20 bp, synthetic construct
  source 1..20: mol_type = other DNA; note = Description of Artificial Sequence: Synthetic oligonucleotide
cttcccaccacgagtgtaag

SEQ ID NO: 23419 - DNA, 20 bp, synthetic construct
  source 1..20: mol_type = other DNA; note = Description of Artificial Sequence: Synthetic oligonucleotide
tcttcccaccacgagtgtaa

SEQ ID NO: 23420 - DNA, 20 bp, synthetic construct
  source 1..20: mol_type = other DNA; note = Description of Artificial Sequence: Synthetic oligonucleotide
ctcttcccaccacgagtgta

SEQ ID NO: 23421 - DNA, 20 bp, synthetic construct
  source 1..20: mol_type = other DNA; note = Description of Artificial Sequence: Synthetic oligonucleotide
actcttcccaccacgagtgt

SEQ ID NO: 23422 - DNA, 20 bp, synthetic construct
  source 1..20: mol_type = other DNA; note = Description of Artificial Sequence: Synthetic oligonucleotide
aactcttcccaccacgagtg

SEQ ID NO: 23423 - DNA, 20 bp, synthetic construct
  source 1..20: mol_type = other DNA; note = Description of Artificial Sequence: Synthetic oligonucleotide
aaactcttcccaccacgagt

SEQ ID NO: 23424 - DNA, 20 bp, synthetic construct
  source 1..20: mol_type = other DNA; note = Description of Artificial Sequence: Synthetic oligonucleotide
taaactcttcccaccacgag

SEQ ID NO: 23425 - DNA, 20 bp, synthetic construct
  source 1..20: mol_type = other DNA; note = Description of Artificial Sequence: Synthetic oligonucleotide
ctaaactcttcccaccacga

SEQ ID NO: 23426 - DNA, 20 bp, synthetic construct
  source 1..20: mol_type = other DNA; note = Description of Artificial Sequence: Synthetic oligonucleotide
actaaactcttcccaccacg

SEQ ID NO: 23427 - DNA, 20 bp, synthetic construct
  source 1..20: mol_type = other DNA; note = Description of Artificial Sequence: Synthetic oligonucleotide
cactaaactcttcccaccac

SEQ ID NO: 23428 - DNA, 20 bp, synthetic construct
  source 1..20: mol_type = other DNA; note = Description of Artificial Sequence: Synthetic oligonucleotide
acactaaactcttcccacca

SEQ ID NO: 23429 - DNA, 20 bp, synthetic construct
  source 1..20: mol_type = other DNA; note = Description of Artificial Sequence: Synthetic oligonucleotide
cacactaaactcttcccacc

SEQ ID NO: 23430 - DNA, 20 bp, synthetic construct
  source 1..20: mol_type = other DNA; note = Description of Artificial Sequence: Synthetic oligonucleotide
tcacactaaactcttcccac

SEQ ID NO: 23431 - DNA, 20 bp, synthetic construct
  source 1..20: mol_type = other DNA; note = Description of Artificial Sequence: Synthetic oligonucleotide
ttcacactaaactcttccca

SEQ ID NO: 23432 - DNA, 20 bp, synthetic construct
  source 1..20: mol_type = other DNA; note = Description of Artificial Sequence: Synthetic oligonucleotide
tttcacactaaactcttccc

SEQ ID NO: 23433 - DNA, 20 bp, synthetic construct
  source 1..20: mol_type = other DNA; note = Description of Artificial Sequence: Synthetic oligonucleotide
gtttcacactaaactcttcc

SEQ ID NO: 23434 - DNA, 20 bp, synthetic construct
  source 1..20: mol_type = other DNA; note = Description of Artificial Sequence: Synthetic oligonucleotide
agtttcacactaaactcttc

SEQ ID NO: 23435 - DNA, 20 bp, synthetic construct
  source 1..20: mol_type = other DNA; note = Description of Artificial Sequence: Synthetic oligonucleotide
cagtttcacactaaactctt

SEQ ID NO: 23436 - DNA, 20 bp, synthetic construct
  source 1..20: mol_type = other DNA; note = Description of Artificial Sequence: Synthetic oligonucleotide
ccagtttcacactaaactct

SEQ ID NO: 23437 - DNA, 20 bp, synthetic construct
  source 1..20: mol_type = other DNA; note = Description of Artificial Sequence: Synthetic oligonucleotide
cccagtttcacactaaactc

SEQ ID NO: 23438 - DNA, 20 bp, synthetic construct
  source 1..20: mol_type = other DNA; note = Description of Artificial Sequence: Synthetic oligonucleotide
ccccagtttcacactaaact

SEQ ID NO: 23439 - DNA, 20 bp, synthetic construct
  source 1..20: mol_type = other DNA; note = Description of Artificial Sequence: Synthetic oligonucleotide
accccagtttcacactaaac

SEQ ID NO: 23440 - DNA, 20 bp, synthetic construct
  source 1..20: mol_type = other DNA; note = Description of Artificial Sequence: Synthetic oligonucleotide
caccccagtttcacactaaa

SEQ ID NO: 23441 - DNA, 20 bp, synthetic construct
  source 1..20: mol_type = other DNA; note = Description of Artificial Sequence: Synthetic oligonucleotide
ccaccccagtttcacactaa

SEQ ID NO: 23442 - DNA, 20 bp, synthetic construct
  source 1..20: mol_type = other DNA; note = Description of Artificial Sequence: Synthetic oligonucleotide
tccaccccagtttcacacta

SEQ ID NO: 23443 - DNA, 20 bp, synthetic construct
  source 1..20: mol_type = other DNA; note = Description of Artificial Sequence: Synthetic oligonucleotide
ttccaccccagtttcacact

SEQ ID NO: 23444 - DNA, 20 bp, synthetic construct
  source 1..20: mol_type = other DNA; note = Description of Artificial Sequence: Synthetic oligonucleotide
attccaccccagtttcacac

SEQ ID NO: 23445 - DNA, 20 bp, synthetic construct
  source 1..20: mol_type = other DNA; note = Description of Artificial Sequence: Synthetic oligonucleotide
aattccaccccagtttcaca

SEQ ID NO: 23446 - DNA, 20 bp, synthetic construct
  source 1..20: mol_type = other DNA; note = Description of Artificial Sequence: Synthetic oligonucleotide
caattccaccccagtttcac

SEQ ID NO: 23447 - DNA, 20 bp, synthetic construct
  source 1..20: mol_type = other DNA; note = Description of Artificial Sequence: Synthetic oligonucleotide
ccaattccaccccagtttca

SEQ ID NO: 23448 - DNA, 20 bp, synthetic construct
  source 1..20: mol_type = other DNA; note = Description of Artificial Sequence: Synthetic oligonucleotide
cccaattccaccccagtttc

SEQ ID NO: 23449 - DNA, 20 bp, synthetic construct
  source 1..20: mol_type = other DNA; note = Description of Artificial Sequence: Synthetic oligonucleotide
acccaattccaccccagttt

SEQ ID NO: 23450 - DNA, 20 bp, synthetic construct
  source 1..20: mol_type = other DNA; note = Description of Artificial Sequence: Synthetic oligonucleotide
cacccaattccaccccagtt

SEQ ID NO: 23451 - DNA, 20 bp, synthetic construct
  source 1..20: mol_type = other DNA; note = Description of Artificial Sequence: Synthetic oligonucleotide
acacccaattccaccccagt

SEQ ID NO: 23452 - DNA, 20 bp, synthetic construct
  source 1..20: mol_type = other DNA; note = Description of Artificial Sequence: Synthetic oligonucleotide
gacacccaattccaccccag

SEQ ID NO: 23453 - DNA, 20 bp, synthetic construct
  source 1..20: mol_type = other DNA; note = Description of Artificial Sequence: Synthetic oligonucleotide
ggacacccaattccacccca

SEQ ID NO: 23454 - DNA, 20 bp, synthetic construct
  source 1..20: mol_type = other DNA; note = Description of Artificial Sequence: Synthetic oligonucleotide
tggacacccaattccacccc

SEQ ID NO: 23455 - DNA, 20 bp, synthetic construct
  source 1..20: mol_type = other DNA; note = Description of Artificial Sequence: Synthetic oligonucleotide
gtggacacccaattccaccc

SEQ ID NO: 23456 - DNA, 20 bp, synthetic construct
  source 1..20: mol_type = other DNA; note = Description of Artificial Sequence: Synthetic oligonucleotide
cgtggacacccaattccacc

SEQ ID NO: 23457 - DNA, 20 bp, synthetic construct
  source 1..20: mol_type = other DNA; note = Description of Artificial Sequence: Synthetic oligonucleotide
acgtggacacccaattccac

SEQ ID NO: 23458 - DNA, 20 bp, synthetic construct
  source 1..20: mol_type = other DNA; note = Description of Artificial Sequence: Synthetic oligonucleotide
tacgtggacacccaattcca

SEQ ID NO: 23459 - DNA, 20 bp, synthetic construct
  source 1..20: mol_type = other DNA; note = Description of Artificial Sequence: Synthetic oligonucleotide
atacgtggacacccaattcc

SEQ ID NO: 23460 - DNA, 20 bp, synthetic construct
  source 1..20: mol_type = other DNA; note = Description of Artificial Sequence: Synthetic oligonucleotide
catacgtggacacccaattc

SEQ ID NO: 23461 - DNA, 20 bp, synthetic construct
  source 1..20: mol_type = other DNA; note = Description of Artificial Sequence: Synthetic oligonucleotide
acatacgtggacacccaatt

SEQ ID NO: 23462 - DNA, 20 bp, synthetic construct
  source 1..20: mol_type = other DNA; note = Description of Artificial Sequence: Synthetic oligonucleotide
aacatacgtggacacccaat

SEQ ID NO: 23463 - DNA, 20 bp, synthetic construct
  source 1..20: mol_type = other DNA; note = Description of Artificial Sequence: Synthetic oligonucleotide
gaacatacgtggacacccaa

SEQ ID NO: 23464 - DNA, 20 bp, synthetic construct
  source 1..20: mol_type = other DNA; note = Description of Artificial Sequence: Synthetic oligonucleotide
ggaacatacgtggacaccca

SEQ ID NO: 23465 - DNA, 20 bp, synthetic construct
  source 1..20: mol_type = other DNA; note = Description of Artificial Sequence: Synthetic oligonucleotide
gggaacatacgtggacaccc

SEQ ID NO: 23466 - DNA, 20 bp, synthetic construct
  source 1..20: mol_type = other DNA; note = Description of Artificial Sequence: Synthetic oligonucleotide
agggaacatacgtggacacc

SEQ ID NO: 23467 - DNA, 20 bp, synthetic construct
  source 1..20: mol_type = other DNA; note = Description of Artificial Sequence: Synthetic oligonucleotide
aagggaacatacgtggacac

SEQ ID NO: 23468 - DNA, 20 bp, synthetic construct
  source 1..20: mol_type = other DNA; note = Description of Artificial Sequence: Synthetic oligonucleotide
aaagggaacatacgtggaca

SEQ ID NO: 23469 - DNA, 20 bp, synthetic construct
  source 1..20: mol_type = other DNA; note = Description of Artificial Sequence: Synthetic oligonucleotide
aaaagggaacatacgtggac

SEQ ID NO: 23470 - DNA, 20 bp, synthetic construct
  source 1..20: mol_type = other DNA; note = Description of Artificial Sequence: Synthetic oligonucleotide
caaaagggaacatacgtgga

SEQ ID NO: 23471 - DNA, 20 bp, synthetic construct
  source 1..20: mol_type = other DNA; note = Description of Artificial Sequence: Synthetic oligonucleotide
gcaaaagggaacatacgtgg

SEQ ID NO: 23472 - DNA, 20 bp, synthetic construct
  source 1..20: mol_type = other DNA; note = Description of Artificial Sequence: Synthetic oligonucleotide
ggcaaaagggaacatacgtg

SEQ ID NO: 23473 - DNA, 20 bp, synthetic construct
  source 1..20: mol_type = other DNA; note = Description of Artificial Sequence: Synthetic oligonucleotide
aggcaaaagggaacatacgt

SEQ ID NO: 23474 - DNA, 20 bp, synthetic construct
  source 1..20: mol_type = other DNA; note = Description of Artificial Sequence: Synthetic oligonucleotide
aaggcaaaagggaacatacg

SEQ ID NO: 23475 - DNA, 20 bp, synthetic construct
  source 1..20: mol_type = other DNA; note = Description of Artificial Sequence: Synthetic oligonucleotide
taaggcaaaagggaacatac

SEQ ID NO: 23476 - DNA, 20 bp, synthetic construct
  source 1..20: mol_type = other DNA; note = Description of Artificial Sequence: Synthetic oligonucleotide
gtaaggcaaaagggaacata

SEQ ID NO: 23477 - DNA, 20 bp, synthetic construct
  source 1..20: mol_type = other DNA; note = Description of Artificial Sequence: Synthetic oligonucleotide
agtaaggcaaaagggaacat

SEQ ID NO: 23478 - DNA, 20 bp, synthetic construct
  source 1..20: mol_type = other DNA; note = Description of Artificial Sequence: Synthetic oligonucleotide
tagtaaggcaaaagggaaca

SEQ ID NO: 23479 - DNA, 20 bp, synthetic construct
  source 1..20: mol_type = other DNA; note = Description of Artificial Sequence: Synthetic oligonucleotide
atagtaaggcaaaagggaac

SEQ ID NO: 23480 - DNA, 20 bp, synthetic construct
  source 1..20: mol_type = other DNA; note = Description of Artificial Sequence: Synthetic oligonucleotide
tatagtaaggcaaaagggaa

SEQ ID NO: 23481 - DNA, 20 bp, synthetic construct
  source 1..20: mol_type = other DNA; note = Description of Artificial Sequence: Synthetic oligonucleotide
atatagtaaggcaaaaggga

SEQ ID NO: 23482 - DNA, 20 bp, synthetic construct
  source 1..20: mol_type = other DNA; note = Description of Artificial Sequence: Synthetic oligonucleotide
catatagtaaggcaaaaggg

SEQ ID NO: 23483 - DNA, 20 bp, synthetic construct
  source 1..20: mol_type = other DNA; note = Description of Artificial Sequence: Synthetic oligonucleotide
acatatagtaaggcaaaagg

SEQ ID NO: 23484 - DNA, 20 bp, synthetic construct
  source 1..20: mol_type = other DNA; note = Description of Artificial Sequence: Synthetic oligonucleotide
aacatatagtaaggcaaaag

SEQ ID NO: 23485 - DNA, 20 bp, synthetic construct
  source 1..20: mol_type = other DNA; note = Description of Artificial Sequence: Synthetic oligonucleotide
gaacatatagtaaggcaaaa

SEQ ID NO: 23486 - DNA, 20 bp, synthetic construct
  source 1..20: mol_type = other DNA; note = Description of Artificial Sequence: Synthetic oligonucleotide
agaacatatagtaaggcaaa

SEQ ID NO: 23487 - DNA, 20 bp, synthetic construct
  source 1..20: mol_type = other DNA; note = Description of Artificial Sequence: Synthetic oligonucleotide
cagaacatatagtaaggcaa

SEQ ID NO: 23488 - DNA, 20 bp, synthetic construct
  source 1..20: mol_type = other DNA; note = Description of Artificial Sequence: Synthetic oligonucleotide
acagaacatatagtaaggca

SEQ ID NO: 23489 - DNA, 20 bp, synthetic construct
  source 1..20: mol_type = other DNA; note = Description of Artificial Sequence: Synthetic oligonucleotide
gacagaacatatagtaaggc

SEQ ID NO: 23490 - DNA, 20 bp, synthetic construct
  source 1..20: mol_type = other DNA; note = Description of Artificial Sequence: Synthetic oligonucleotide
tgacagaacatatagtaagg

SEQ ID NO: 23491 - DNA, 20 bp, synthetic construct
  source 1..20: mol_type = other DNA; note = Description of Artificial Sequence: Synthetic oligonucleotide
ctgacagaacatatagtaag

SEQ ID NO: 23492 - DNA, 20 bp, synthetic construct
  source 1..20: mol_type = other DNA; note = Description of Artificial Sequence: Synthetic oligonucleotide
actgacagaacatatagtaa

SEQ ID NO: 23493 - DNA, 20 bp, synthetic construct
  source 1..20: mol_type = other DNA; note = Description of Artificial Sequence: Synthetic oligonucleotide
aactgacagaacatatagta

SEQ ID NO: 23494 - DNA, 20 bp, synthetic construct
  source 1..20: mol_type = other DNA; note = Description of Artificial Sequence: Synthetic oligonucleotide
aaactgacagaacatatagt

SEQ ID NO: 23495 - DNA, 20 bp, synthetic construct
  source 1..20: mol_type = other DNA; note = Description of Artificial Sequence: Synthetic oligonucleotide
gaaactgacagaacatatag

SEQ ID NO: 23496 - DNA, 20 bp, synthetic construct
  source 1..20: mol_type = other DNA; note = Description of Artificial Sequence: Synthetic oligonucleotide
agaaactgacagaacatata

SEQ ID NO: 23497 - DNA, 20 bp, synthetic construct
  source 1..20: mol_type = other DNA; note = Description of Artificial Sequence: Synthetic oligonucleotide
aagaaactgacagaacatat

SEQ ID NO: 23498 - DNA, 20 bp, synthetic construct
  source 1..20: mol_type = other DNA; note = Description of Artificial Sequence: Synthetic oligonucleotide
aaagaaactgacagaacata

SEQ ID NO: 23499 - DNA, 20 bp, synthetic construct
  source 1..20: mol_type = other DNA; note = Description of Artificial Sequence: Synthetic oligonucleotide
gaaagaaactgacagaacat

SEQ ID NO: 23500 - DNA, 20 bp, synthetic construct
  source 1..20: mol_type = other DNA; note = Description of Artificial Sequence: Synthetic oligonucleotide
tgaaagaaactgacagaaca

SEQ ID NO: 23501 - DNA, 20 bp, synthetic construct
  source 1..20: mol_type = other DNA; note = Description of Artificial Sequence: Synthetic oligonucleotide
ctgaaagaaactgacagaac

SEQ ID NO: 23502 - DNA, 20 bp, synthetic construct
  source 1..20: mol_type = other DNA; note = Description of Artificial Sequence: Synthetic oligonucleotide
cctgaaagaaactgacagaa

SEQ ID NO: 23503 - DNA, 20 bp, synthetic construct
  source 1..20: mol_type = other DNA; note = Description of Artificial Sequence: Synthetic oligonucleotide
tcctgaaagaaactgacaga

SEQ ID NO: 23504 - DNA, 20 bp, synthetic construct
  source 1..20: mol_type = other DNA; note = Description of Artificial Sequence: Synthetic oligonucleotide
ttcctgaaagaaactgacag

SEQ ID NO: 23505 - DNA, 20 bp, synthetic construct
  source 1..20: mol_type = other DNA; note = Description of Artificial Sequence: Synthetic oligonucleotide
tttcctgaaagaaactgaca

SEQ ID NO: 23506 - DNA, 20 bp, synthetic construct
  source 1..20: mol_type = other DNA; note = Description of Artificial Sequence: Synthetic oligonucleotide
ttttcctgaaagaaactgac

SEQ ID NO: 23507 - DNA, 20 bp, synthetic construct
  source 1..20: mol_type = other DNA; note = Description of Artificial Sequence: Synthetic oligonucleotide
attttcctgaaagaaactga

SEQ ID NO: 23508 - DNA, 20 bp, synthetic construct
  source 1..20: mol_type = other DNA; note = Description of Artificial Sequence: Synthetic oligonucleotide
gattttcctgaaagaaactg

SEQ ID NO: 23509 - DNA, 20 bp, synthetic construct
  source 1..20: mol_type = other DNA; note = Description of Artificial Sequence: Synthetic oligonucleotide
agattttcctgaaagaaact

SEQ ID NO: 23510 - DNA, 20 bp, synthetic construct
  source 1..20: mol_type = other DNA; note = Description of Artificial Sequence: Synthetic oligonucleotide
aagattttcctgaaagaaac

SEQ ID NO: 23511 - DNA, 20 bp, synthetic construct
  source 1..20: mol_type = other DNA; note = Description of Artificial Sequence: Synthetic oligonucleotide
gaagattttcctgaaagaaa

SEQ ID NO: 23512 - DNA, 20 bp, synthetic construct
  source 1..20: mol_type = other DNA; note = Description of Artificial Sequence: Synthetic oligonucleotide
tgaagattttcctgaaagaa

SEQ ID NO: 23513 - DNA, 20 bp, synthetic construct
  source 1..20: mol_type = other DNA; note = Description of Artificial Sequence: Synthetic oligonucleotide
atgaagattttcctgaaaga

SEQ ID NO: 23514 - DNA, 20 bp, synthetic construct
  source 1..20: mol_type = other DNA; note = Description of Artificial Sequence: Synthetic oligonucleotide
gatgaagattttcctgaaag

SEQ ID NO: 23515 - DNA, 20 bp, synthetic construct
  source 1..20: mol_type = other DNA; note = Description of Artificial Sequence: Synthetic oligonucleotide
agatgaagattttcctgaaa

SEQ ID NO: 23516 - DNA, 20 bp, synthetic construct
  source 1..20: mol_type = other DNA; note = Description of Artificial Sequence: Synthetic oligonucleotide
aagatgaagattttcctgaa

SEQ ID NO: 23517 - DNA, 20 bp, synthetic construct
  source 1..20: mol_type = other DNA; note = Description of Artificial Sequence: Synthetic oligonucleotide
taagatgaagattttcctga

SEQ ID NO: 23518 - DNA, 20 bp, synthetic construct
  source 1..20: mol_type = other DNA; note = Description of Artificial Sequence: Synthetic oligonucleotide
gtaagatgaagattttcctg

SEQ ID NO: 23519 - DNA, 20 bp, synthetic construct
  source 1..20: mol_type = other DNA; note = Description of Artificial Sequence: Synthetic oligonucleotide
tgtaagatgaagattttcct

SEQ ID NO: 23520 - DNA, 20 bp, synthetic construct
  source 1..20: mol_type = other DNA; note = Description of Artificial Sequence: Synthetic oligonucleotide
ttgtaagatgaagattttcc

SEQ ID NO: 23521 - DNA, 20 bp, synthetic construct
  source 1..20: mol_type = other DNA; note = Description of Artificial Sequence: Synthetic oligonucleotide
gttgtaagatgaagattttc

SEQ ID NO: 23522 - DNA, 20 bp, synthetic construct
  source 1..20: mol_type = other DNA; note = Description of Artificial Sequence: Synthetic oligonucleotide
agttgtaagatgaagatttt

SEQ ID NO: 23523 - DNA, 20 bp, synthetic construct
  source 1..20: mol_type = other DNA; note = Description of Artificial Sequence: Synthetic oligonucleotide
aagttgtaagatgaagattt

SEQ ID NO: 23524 - DNA, 20 bp, synthetic construct
  source 1..20: mol_type = other DNA; note = Description of Artificial Sequence: Synthetic oligonucleotide
caagttgtaagatgaagatt

SEQ ID NO: 23525 - DNA, 20 bp, synthetic construct
  source 1..20: mol_type = other DNA; note = Description of Artificial Sequence: Synthetic oligonucleotide
acaagttgtaagatgaagat

SEQ ID NO: 23526 - DNA, 20 bp, synthetic construct
  source 1..20: mol_type = other DNA; note = Description of Artificial Sequence: Synthetic oligonucleotide
tacaagttgtaagatgaaga

SEQ ID NO: 23527 - DNA, 20 bp, synthetic construct
  source 1..20: mol_type = other DNA; note = Description of Artificial Sequence: Synthetic oligonucleotide
ctacaagttgtaagatgaag

SEQ ID NO: 23528 - DNA, 20 bp, synthetic construct
  source 1..20: mol_type = other DNA; note = Description of Artificial Sequence: Synthetic oligonucleotide
cctacaagttgtaagatgaa

SEQ ID NO: 23529 - DNA, 20 bp, synthetic construct
  source 1..20: mol_type = other DNA; note = Description of Artificial Sequence: Synthetic oligonucleotide
ccctacaagttgtaagatga

SEQ ID NO: 23530 - DNA, 20 bp, synthetic construct
  source 1..20: mol_type = other DNA; note = Description of Artificial Sequence: Synthetic oligonucleotide
gccctacaagttgtaagatg

SEQ ID NO: 23531 - DNA, 20 bp, synthetic construct
  source 1..20: mol_type = other DNA; note = Description of Artificial Sequence: Synthetic oligonucleotide
agccctacaagttgtaagat

SEQ ID NO: 23532 - DNA, 20 bp, synthetic construct
  source 1..20: mol_type = other DNA; note = Description of Artificial Sequence: Synthetic oligonucleotide
cagccctacaagttgtaaga

SEQ ID NO: 23533 - DNA, 20 bp, synthetic construct
  source 1..20: mol_type = other DNA; note = Description of Artificial Sequence: Synthetic oligonucleotide
ccagccctacaagttgtaag

SEQ ID NO: 23534 - DNA, 20 bp, synthetic construct
  source 1..20: mol_type = other DNA; note = Description of Artificial Sequence: Synthetic oligonucleotide
accagccctacaagttgtaa

SEQ ID NO: 23535 - DNA, 20 bp, synthetic construct
  source 1..20: mol_type = other DNA; note = Description of Artificial Sequence: Synthetic oligonucleotide
caccagccctacaagttgta

SEQ ID NO: 23536 - DNA, 20 bp, synthetic construct
  source 1..20: mol_type = other DNA; note = Description of Artificial Sequence: Synthetic oligonucleotide
acaccagccctacaagttgt

SEQ ID NO: 23537 - DNA, 20 bp, synthetic construct
  source 1..20: mol_type = other DNA; note = Description of Artificial Sequence: Synthetic oligonucleotide
aacaccagccctacaagttg

SEQ ID NO: 23538 - DNA, 20 bp, synthetic construct
  source 1..20: mol_type = other DNA; note = Description of Artificial Sequence: Synthetic oligonucleotide
taacaccagccctacaagtt

SEQ ID NO: 23539 - DNA, 20 bp, synthetic construct
  source 1..20: mol_type = other DNA; note = Description of Artificial Sequence: Synthetic oligonucleotide
ttaacaccagccctacaagt

SEQ ID NO: 23540 - DNA, 20 bp, synthetic construct
  source 1..20: mol_type = other DNA; note = Description of Artificial Sequence: Synthetic oligonucleotide
gttaacaccagccctacaag

SEQ ID NO: 23541 - DNA, 20 bp, synthetic construct
  source 1..20: mol_type = other DNA; note = Description of Artificial Sequence: Synthetic oligonucleotide
agttaacaccagccctacaa

SEQ ID NO: 23542 - DNA, 20 bp, synthetic construct
  source 1..20: mol_type = other DNA; note = Description of Artificial Sequence: Synthetic oligonucleotide
aagttaacaccagccctaca

SEQ ID NO: 23543 - DNA, 20 bp, synthetic construct
  source 1..20: mol_type = other DNA; note = Description of Artificial Sequence: Synthetic oligonucleotide
taagttaacaccagccctac

SEQ ID NO: 23544 - DNA, 20 bp, synthetic construct
  source 1..20: mol_type = other DNA; note = Description of Artificial Sequence: Synthetic oligonucleotide
gtaagttaacaccagcccta

SEQ ID NO: 23545 - DNA, 20 bp, synthetic construct
  source 1..20: mol_type = other DNA; note = Description of Artificial Sequence: Synthetic oligonucleotide
cgtaagttaacaccagccct

SEQ ID NO: 23546 - DNA, 20 bp, synthetic construct
  source 1..20: mol_type = other DNA; note = Description of Artificial Sequence: Synthetic oligonucleotide
tcgtaagttaacaccagccc

SEQ ID NO: 23547 - DNA, 20 bp, synthetic construct
  source 1..20: mol_type = other DNA; note = Description of Artificial Sequence: Synthetic oligonucleotide
gtcgtaagttaacaccagcc

SEQ ID NO: 23548 - DNA, 20 bp, synthetic construct
  source 1..20: mol_type = other DNA; note = Description of Artificial Sequence: Synthetic oligonucleotide
agtcgtaagttaacaccagc

SEQ ID NO: 23549 - DNA, 20 bp, synthetic construct
  source 1..20: mol_type = other DNA; note = Description of Artificial Sequence: Synthetic oligonucleotide
aagtcgtaagttaacaccag

SEQ ID NO: 23550 - DNA, 20 bp, synthetic construct
  source 1..20: mol_type = other DNA; note = Description of Artificial Sequence: Synthetic oligonucleotide
gaagtcgtaagttaacacca

SEQ ID NO: 23551 - DNA, 20 bp, synthetic construct
  source 1..20: mol_type = other DNA; note = Description of Artificial Sequence: Synthetic oligonucleotide
tgaagtcgtaagttaacacc

SEQ ID NO: 23552 - DNA, 20 bp, synthetic construct
  source 1..20: mol_type = other DNA; note = Description of Artificial Sequence: Synthetic oligonucleotide
gtgaagtcgtaagttaacac

SEQ ID NO: 23553 - DNA, 20 bp, synthetic construct
  source 1..20: mol_type = other DNA; note = Description of Artificial Sequence: Synthetic oligonucleotide
agtgaagtcgtaagttaaca

SEQ ID NO: 23554 - DNA, 20 bp, synthetic construct
  source 1..20: mol_type = other DNA; note = Description of Artificial Sequence: Synthetic oligonucleotide
tagtgaagtcgtaagttaac

SEQ ID NO: 23555 - DNA, 20 bp, synthetic construct
  source 1..20: mol_type = other DNA; note = Description of Artificial Sequence: Synthetic oligonucleotide
ttagtgaagtcgtaagttaa

SEQ ID NO: 23556 - DNA, 20 bp, synthetic construct
  source 1..20: mol_type = other DNA; note = Description of Artificial Sequence: Synthetic oligonucleotide
gttagtgaagtcgtaagtta

SEQ ID NO: 23557 - DNA, 20 bp, synthetic construct
  source 1..20: mol_type = other DNA; note = Description of Artificial Sequence: Synthetic oligonucleotide
agttagtgaagtcgtaagtt

SEQ ID NO: 23558 - DNA, 20 bp, synthetic construct
  source 1..20: mol_type = other DNA; note = Description of Artificial Sequence: Synthetic oligonucleotide
cagttagtgaagtcgtaagt

SEQ ID NO: 23559 - DNA, 20 bp, synthetic construct
  source 1..20: mol_type = other DNA; note = Description of Artificial Sequence: Synthetic oligonucleotide
acagttagtgaagtcgtaag

SEQ ID NO: 23560 - DNA, 20 bp, synthetic construct
  source 1..20: mol_type = other DNA; note = Description of Artificial Sequence: Synthetic oligonucleotide
cacagttagtgaagtcgtaa

SEQ ID NO: 23561 - DNA, 20 bp, synthetic construct
  source 1..20: mol_type = other DNA; note = Description of Artificial Sequence: Synthetic oligonucleotide
tcacagttagtgaagtcgta

SEQ ID NO: 23562 - DNA, 20 bp, synthetic construct
  source 1..20: mol_type = other DNA; note = Description of Artificial Sequence: Synthetic oligonucleotide
gtcacagttagtgaagtcgt

SEQ ID NO: 23563 - DNA, 20 bp, synthetic construct
  source 1..20: mol_type = other DNA; note = Description of Artificial Sequence: Synthetic oligonucleotide
agtcacagttagtgaagtcg

SEQ ID NO: 23564 - DNA, 20 bp, synthetic construct
  source 1..20: mol_type = other DNA; note = Description of Artificial Sequence: Synthetic oligonucleotide
aagtcacagttagtgaagtc

SEQ ID NO: 23565 - DNA, 20 bp, synthetic construct
  source 1..20: mol_type = other DNA; note = Description of Artificial Sequence: Synthetic oligonucleotide
aaagtcacagttagtgaagt

SEQ ID NO: 23566 - DNA, 20 bp, synthetic construct
  source 1..20: mol_type = other DNA; note = Description of Artificial Sequence: Synthetic oligonucleotide
caaagtcacagttagtgaag

SEQ ID NO: 23567 - DNA, 20 bp, synthetic construct
  source 1..20: mol_type = other DNA; note = Description of Artificial Sequence: Synthetic oligonucleotide
tcaaagtcacagttagtgaa

SEQ ID NO: 23568 - DNA, 20 bp, synthetic construct
  source 1..20: mol_type = other DNA; note = Description of Artificial Sequence: Synthetic oligonucleotide
ctcaaagtcacagttagtga

SEQ ID NO: 23569 - DNA, 20 bp, synthetic construct
  source 1..20: mol_type = other DNA; note = Description of Artificial Sequence: Synthetic oligonucleotide
tctcaaagtcacagttagtg

SEQ ID NO: 23570 - DNA, 20 bp, synthetic construct
  source 1..20: mol_type = other DNA; note = Description of Artificial Sequence: Synthetic oligonucleotide
ttctcaaagtcacagttagt

SEQ ID NO: 23571 - DNA, 20 bp, synthetic construct
  source 1..20: mol_type = other DNA; note = Description of Artificial Sequence: Synthetic oligonucleotide
cttctcaaagtcacagttag

SEQ ID NO: 23572 - DNA, 20 bp, synthetic construct
  source 1..20: mol_type = other DNA; note = Description of Artificial Sequence: Synthetic oligonucleotide
tcttctcaaagtcacagtta

SEQ ID NO: 23573 - DNA, 20 bp, synthetic construct
  source 1..20: mol_type = other DNA; note = Description of Artificial Sequence: Synthetic oligonucleotide
atcttctcaaagtcacagtt

SEQ ID NO: 23574 - DNA, 20 bp, synthetic construct
  source 1..20: mol_type = other DNA; note = Description of Artificial Sequence: Synthetic oligonucleotide
aatcttctcaaagtcacagt

SEQ ID NO: 23575 - DNA, 20 bp, synthetic construct
  source 1..20: mol_type = other DNA; note = Description of Artificial Sequence: Synthetic oligonucleotide
taatcttctcaaagtcacag

SEQ ID NO: 23576 - DNA, 20 bp, synthetic construct
  source 1..20: mol_type = other DNA; note = Description of Artificial Sequence: Synthetic oligonucleotide
ttaatcttctcaaagtcaca

SEQ ID NO: 23577 - DNA, 20 bp, synthetic construct
  source 1..20: mol_type = other DNA; note = Description of Artificial Sequence: Synthetic oligonucleotide
tttaatcttctcaaagtcac

SEQ ID NO: 23578 - DNA, 20 bp, synthetic construct
  source 1..20: mol_type = other DNA; note = Description of Artificial Sequence: Synthetic oligonucleotide
ctttaatcttctcaaagtca

SEQ ID NO: 23579 - DNA, 20 bp, synthetic construct
  source 1..20: mol_type = other DNA; note = Description of Artificial Sequence: Synthetic oligonucleotide
gctttaatcttctcaaagtc

SEQ ID NO: 23580 - DNA, 20 bp, synthetic construct
  source 1..20: mol_type = other DNA; note = Description of Artificial Sequence: Synthetic oligonucleotide
tgctttaatcttctcaaagt

SEQ ID NO: 23581 - DNA, 20 bp, synthetic construct
  source 1..20: mol_type = other DNA; note = Description of Artificial Sequence: Synthetic oligonucleotide
ctgctttaatcttctcaaag

SEQ ID NO: 23582 - DNA, 20 bp, synthetic construct
  source 1..20: mol_type = other DNA; note = Description of Artificial Sequence: Synthetic oligonucleotide
gctgctttaatcttctcaaa

SEQ ID NO: 23583 - DNA, 20 bp, synthetic construct
  source 1..20: mol_type = other DNA; note = Description of Artificial Sequence: Synthetic oligonucleotide
ggctgctttaatcttctcaa

SEQ ID NO: 23584 - DNA, 20 bp, synthetic construct
  source 1..20: mol_type = other DNA; note = Description of Artificial Sequence: Synthetic oligonucleotide
aggctgctttaatcttctca

SEQ ID NO: 23585 - DNA, 20 bp, synthetic construct
  source 1..20: mol_type = other DNA; note = Description of Artificial Sequence: Synthetic oligonucleotide
taggctgctttaatcttctc

SEQ ID NO: 23586 - DNA, 20 bp, synthetic construct
  source 1..20: mol_type = other DNA; note = Description of Artificial Sequence: Synthetic oligonucleotide
ataggctgctttaatcttct

SEQ ID NO: 23587 - DNA, 20 bp, synthetic construct
  source 1..20: mol_type = other DNA; note = Description of Artificial Sequence: Synthetic oligonucleotide
gataggctgctttaatcttc

SEQ ID NO: 23588 - DNA, 20 bp, synthetic construct
  source 1..20: mol_type = other DNA; note = Description of Artificial Sequence: Synthetic oligonucleotide
agataggctgctttaatctt

SEQ ID NO: 23589 - DNA, 20 bp, synthetic construct
  source 1..20: mol_type = other DNA; note = Description of Artificial Sequence: Synthetic oligonucleotide
gagataggctgctttaatct

SEQ ID NO: 23590 - DNA, 20 bp, synthetic construct
  source 1..20: mol_type = other DNA; note = Description of Artificial Sequence: Synthetic oligonucleotide
tgagataggctgctttaatc

SEQ ID NO: 23591 - DNA, 20 bp, synthetic construct
  source 1..20: mol_type = other DNA; note = Description of Artificial Sequence: Synthetic oligonucleotide
ctgagataggctgctttaat

SEQ ID NO: 23592 - DNA, 20 bp, synthetic construct
  source 1..20: mol_type = other DNA; note = Description of Artificial Sequence: Synthetic oligonucleotide
actgagataggctgctttaa

SEQ ID NO: 23593 - DNA, 20 bp, synthetic construct
  source 1..20: mol_type = other DNA; note = Description of Artificial Sequence: Synthetic oligonucleotide
tactgagataggctgcttta

SEQ ID NO: 23594 - DNA, 20 bp, synthetic construct
  source 1..20: mol_type = other DNA; note = Description of Artificial Sequence: Synthetic oligonucleotide
gtactgagataggctgcttt

SEQ ID NO: 23595 - DNA, 20 bp, synthetic construct
  source 1..20: mol_type = other DNA; note = Description of Artificial Sequence: Synthetic oligonucleotide
agtactgagataggctgctt

SEQ ID NO: 23596 - DNA, 20 bp, synthetic construct
  source 1..20: mol_type = other DNA; note = Description of Artificial Sequence: Synthetic oligonucleotide
tagtactgagataggctgct

SEQ ID NO: 23597 - DNA, 20 bp, synthetic construct
  source 1..20: mol_type = other DNA; note = Description of Artificial Sequence: Synthetic oligonucleotide
atagtactgagataggctgc

SEQ ID NO: 23598 - DNA, 20 bp, synthetic construct
  source 1..20: mol_type = other DNA; note = Description of Artificial Sequence: Synthetic oligonucleotide
aatagtactgagataggctg

SEQ ID NO: 23599 - DNA, 20 bp, synthetic construct
  source 1..20: mol_type = other DNA; note = Description of Artificial Sequence: Synthetic oligonucleotide
aaatagtactgagataggct

SEQ ID NO: 23600 - DNA, 20 bp, synthetic construct
  source 1..20: mol_type = other DNA; note = Description of Artificial Sequence: Synthetic oligonucleotide
gaaatagtactgagataggc

SEQ ID NO: 23601 - DNA, 20 bp, synthetic construct
  source 1..20: mol_type = other DNA; note = Description of Artificial Sequence: Synthetic oligonucleotide
agaaatagtactgagatagg

SEQ ID NO: 23602 - DNA, 20 bp, synthetic construct
  source 1..20: mol_type = other DNA; note = Description of Artificial Sequence: Synthetic oligonucleotide
tagaaatagtactgagatag

SEQ ID NO: 23603 - DNA, 20 bp, synthetic construct
  source 1..20: mol_type = other DNA; note = Description of Artificial Sequence: Synthetic oligonucleotide
ttagaaatagtactgagata

SEQ ID NO: 23604 - DNA, 20 bp, synthetic construct
  source 1..20: mol_type = other DNA; note = Description of Artificial Sequence: Synthetic oligonucleotide
tttagaaatagtactgagat

SEQ ID NO: 23605 - DNA, 20 bp, synthetic construct
  source 1..20: mol_type = other DNA; note = Description of Artificial Sequence: Synthetic oligonucleotide
ctttagaaatagtactgaga

SEQ ID NO: 23606 - DNA, 20 bp, synthetic construct
  source 1..20: mol_type = other DNA; note = Description of Artificial Sequence: Synthetic oligonucleotide
tctttagaaatagtactgag

SEQ ID NO: 23607 - DNA, 20 bp, synthetic construct
  source 1..20: mol_type = other DNA; note = Description of Artificial Sequence: Synthetic oligonucleotide
gtctttagaaatagtactga

SEQ ID NO: 23608 - DNA, 20 bp, synthetic construct
  source 1..20: mol_type = other DNA; note = Description of Artificial Sequence: Synthetic oligonucleotide
ggtctttagaaatagtactg

SEQ ID NO: 23609 - DNA, 20 bp, synthetic construct
  source 1..20: mol_type = other DNA; note = Description of Artificial Sequence: Synthetic oligonucleotide
aggtctttagaaatagtact

SEQ ID NO: 23610 - DNA, 20 bp, synthetic construct
  source 1..20: mol_type = other DNA; note = Description of Artificial Sequence: Synthetic oligonucleotide
caggtctttagaaatagtac

SEQ ID NO: 23611 - DNA, 20 bp, synthetic construct
  source 1..20: mol_type = other DNA; note = Description of Artificial Sequence: Synthetic oligonucleotide
tcaggtctttagaaatagta

SEQ ID NO: 23612 - DNA, 20 bp, synthetic construct
  source 1..20: mol_type = other DNA; note = Description of Artificial Sequence: Synthetic oligonucleotide
atcaggtctttagaaatagt

SEQ ID NO: 23613 - DNA, 20 bp, synthetic construct
  source 1..20: mol_type = other DNA; note = Description of Artificial Sequence: Synthetic oligonucleotide
aatcaggtctttagaaatag

SEQ ID NO: 23614 - DNA, 20 bp, synthetic construct
  source 1..20: mol_type = other DNA; note = Description of Artificial Sequence: Synthetic oligonucleotide
taatcaggtctttagaaata

SEQ ID NO: 23615 - DNA, 20 bp, synthetic construct
  source 1..20: mol_type = other DNA; note = Description of Artificial Sequence: Synthetic oligonucleotide
gtaatcaggtctttagaaat

SEQ ID NO: 23616 - DNA, 20 bp, synthetic construct
  source 1..20: mol_type = other DNA; note = Description of Artificial Sequence: Synthetic oligonucleotide
tgtaatcaggtctttagaaa

SEQ ID NO: 23617 - DNA, 20 bp, synthetic construct
  source 1..20: mol_type = other DNA; note = Description of Artificial Sequence: Synthetic oligonucleotide
atgtaatcaggtctttagaa

SEQ ID NO: 23618 - DNA, 20 bp, synthetic construct
  source 1..20: mol_type = other DNA; note = Description of Artificial Sequence: Synthetic oligonucleotide
tatgtaatcaggtctttaga

SEQ ID NO: 23619 - DNA, 20 bp, synthetic construct
  source 1..20: mol_type = other DNA; note = Description of Artificial Sequence: Synthetic oligonucleotide
atatgtaatcaggtctttag

SEQ ID NO: 23620 - DNA, 20 bp, synthetic construct
  source 1..20: mol_type = other DNA; note = Description of Artificial Sequence: Synthetic oligonucleotide
tatatgtaatcaggtcttta

SEQ ID NO: 23621 - DNA, 20 bp, synthetic construct
  source 1..20: mol_type = other DNA; note = Description of Artificial Sequence: Synthetic oligonucleotide
atatatgtaatcaggtcttt

SEQ ID NO: 23622 - DNA, 20 bp, synthetic construct
  source 1..20: mol_type = other DNA; note = Description of Artificial Sequence: Synthetic oligonucleotide
catatatgtaatcaggtctt

SEQ ID NO: 23623 - DNA, 20 bp, synthetic construct
  source 1..20: mol_type = other DNA; note = Description of Artificial Sequence: Synthetic oligonucleotide
tcatatatgtaatcaggtct

SEQ ID NO: 23624 - DNA, 20 bp, synthetic construct
  source 1..20: mol_type = other DNA; note = Description of Artificial Sequence: Synthetic oligonucleotide
ctcatatatgtaatcaggtc

SEQ ID NO: 23625 - DNA, 20 bp, synthetic construct
  source 1..20: mol_type = other DNA; note = Description of Artificial Sequence: Synthetic oligonucleotide
actcatatatgtaatcaggt

SEQ ID NO: 23626 - DNA, 20 bp, synthetic construct
  source 1..20: mol_type = other DNA; note = Description of Artificial Sequence: Synthetic oligonucleotide
cactcatatatgtaatcagg

SEQ ID NO: 23627 - DNA, 20 bp, synthetic construct
  source 1..20: mol_type = other DNA; note = Description of Artificial Sequence: Synthetic oligonucleotide
ccactcatatatgtaatcag

SEQ ID NO: 23628 - DNA, 20 bp, synthetic construct
  source 1..20: mol_type = other DNA; note = Description of Artificial Sequence: Synthetic oligonucleotide
cccactcatatatgtaatca

SEQ ID NO: 23629 - DNA, 20 bp, synthetic construct
  source 1..20: mol_type = other DNA; note = Description of Artificial Sequence: Synthetic oligonucleotide
tcccactcatatatgtaatc

SEQ ID NO: 23630 - DNA, 20 bp, synthetic construct
  source 1..20: mol_type = other DNA; note = Description of Artificial Sequence: Synthetic oligonucleotide
gtcccactcatatatgtaat

SEQ ID NO: 23631 - DNA, 20 bp, synthetic construct
  source 1..20: mol_type = other DNA; note = Description of Artificial Sequence: Synthetic oligonucleotide
ggtcccactcatatatgtaa

SEQ ID NO: 23632 - DNA, 20 bp, synthetic construct
  source 1..20: mol_type = other DNA; note = Description of Artificial Sequence: Synthetic oligonucleotide
tggtcccactcatatatgta

SEQ ID NO: 23633 - DNA, 20 bp, synthetic construct
  source 1..20: mol_type = other DNA; note = Description of Artificial Sequence: Synthetic oligonucleotide
ttggtcccactcatatatgt

SEQ ID NO: 23634 - DNA, 20 bp, synthetic construct
  source 1..20: mol_type = other DNA; note = Description of Artificial Sequence: Synthetic oligonucleotide
tttggtcccactcatatatg

SEQ ID NO: 23635 - DNA, 20 bp, synthetic construct
  source 1..20: mol_type = other DNA; note = Description of Artificial Sequence: Synthetic oligonucleotide
ttttggtcccactcatatat

SEQ ID NO: 23636 - DNA, 20 bp, synthetic construct
  source 1..20: mol_type = other DNA; note = Description of Artificial Sequence: Synthetic oligonucleotide
cttttggtcccactcatata

SEQ ID NO: 23637 - DNA, 20 bp, synthetic construct
  source 1..20: mol_type = other DNA; note = Description of Artificial Sequence: Synthetic oligonucleotide
acttttggtcccactcatat

SEQ ID NO: 23638 - DNA, 20 bp, synthetic construct
  source 1..20: mol_type = other DNA; note = Description of Artificial Sequence: Synthetic oligonucleotide
tacttttggtcccactcata

SEQ ID NO: 23639 - DNA, 20 bp, synthetic construct
  source 1..20: mol_type = other DNA; note = Description of Artificial Sequence: Synthetic oligonucleotide
gtacttttggtcccactcat

SEQ ID NO: 23640 - DNA, 20 bp, synthetic construct
  source 1..20: mol_type = other DNA; note = Description of Artificial Sequence: Synthetic oligonucleotide
ggtacttttggtcccactca

SEQ ID NO: 23641 - DNA, 20 bp, synthetic construct
  source 1..20: mol_type = other DNA; note = Description of Artificial Sequence: Synthetic oligonucleotide
cggtacttttggtcccactc

SEQ ID NO: 23642 - DNA, 20 bp, synthetic construct
  source 1..20: mol_type = other DNA; note = Description of Artificial Sequence: Synthetic oligonucleotide
tcggtacttttggtcccact

SEQ ID NO: 23643 - DNA, 20 bp, synthetic construct
  source 1..20: mol_type = other DNA; note = Description of Artificial Sequence: Synthetic oligonucleotide
ctcggtacttttggtcccac

SEQ ID NO: 23644 - DNA, 20 bp, synthetic construct
  source 1..20: mol_type = other DNA; note = Description of Artificial Sequence: Synthetic oligonucleotide
actcggtacttttggtccca

SEQ ID NO: 23645 - DNA, 20 bp, synthetic construct
  source 1..20: mol_type = other DNA; note = Description of Artificial Sequence: Synthetic oligonucleotide
aactcggtacttttggtccc

SEQ ID NO: 23646 - DNA, 20 bp, synthetic construct
  source 1..20: mol_type = other DNA; note = Description of Artificial Sequence: Synthetic oligonucleotide
gaactcggtacttttggtcc

SEQ ID NO: 23647 - DNA, 20 bp, synthetic construct
  source 1..20: mol_type = other DNA; note = Description of Artificial Sequence: Synthetic oligonucleotide
tgaactcggtacttttggtc

SEQ ID NO: 23648 - DNA, 20 bp, synthetic construct
  source 1..20: mol_type = other DNA; note = Description of Artificial Sequence: Synthetic oligonucleotide
ttgaactcggtacttttggt

SEQ ID NO: 23649 - DNA, 20 bp, synthetic construct
  source 1..20: mol_type = other DNA; note = Description of Artificial Sequence: Synthetic oligonucleotide
gttgaactcggtacttttgg

SEQ ID NO: 23650 - DNA, 20 bp, synthetic construct
  source 1..20: mol_type = other DNA; note = Description of Artificial Sequence: Synthetic oligonucleotide
tgttgaactcggtacttttg

SEQ ID NO: 23651 - DNA, 20 bp, synthetic construct
  source 1..20: mol_type = other DNA; note = Description of Artificial Sequence: Synthetic oligonucleotide
ttgttgaactcggtactttt

SEQ ID NO: 23652 - DNA, 20 bp, synthetic construct
  source 1..20: mol_type = other DNA; note = Description of Artificial Sequence: Synthetic oligonucleotide
gttgttgaactcggtacttt

SEQ ID NO: 23653 - DNA, 20 bp, synthetic construct
  source 1..20: mol_type = other DNA; note = Description of Artificial Sequence: Synthetic oligonucleotide
tgttgttgaactcggtactt

SEQ ID NO: 23654 - DNA, 20 bp, synthetic construct
  source 1..20: mol_type = other DNA; note = Description of Artificial Sequence: Synthetic oligonucleotide
gtgttgttgaactcggtact

SEQ ID NO: 23655 - DNA, 20 bp, synthetic construct
  source 1..20: mol_type = other DNA; note = Description of Artificial Sequence: Synthetic oligonucleotide
ggtgttgttgaactcggtac

SEQ ID NO: 23656 - DNA, 20 bp, synthetic construct
  source 1..20: mol_type = other DNA; note = Description of Artificial Sequence: Synthetic oligonucleotide
cggtgttgttgaactcggta

SEQ ID NO: 23657 - DNA, 20 bp, synthetic construct
  source 1..20: mol_type = other DNA; note = Description of Artificial Sequence: Synthetic oligonucleotide
acggtgttgttgaactcggt

SEQ ID NO: 23658 - DNA, 20 bp, synthetic construct
  source 1..20: mol_type = other DNA; note = Description of Artificial Sequence: Synthetic oligonucleotide
gacggtgttgttgaactcgg

SEQ ID NO: 23659 - DNA, 20 bp, synthetic construct
  source 1..20: mol_type = other DNA; note = Description of Artificial Sequence: Synthetic oligonucleotide
agacggtgttgttgaactcg

SEQ ID NO: 23660 - DNA, 20 bp, synthetic construct
  source 1..20: mol_type = other DNA; note = Description of Artificial Sequence: Synthetic oligonucleotide
gagacggtgttgttgaactc

SEQ ID NO: 23661 - DNA, 20 bp, synthetic construct
  source 1..20: mol_type = other DNA; note = Description of Artificial Sequence: Synthetic oligonucleotide
agagacggtgttgttgaact

SEQ ID NO: 23662 - DNA, 20 bp, synthetic construct
  source 1..20: mol_type = other DNA; note = Description of Artificial Sequence: Synthetic oligonucleotide
aagagacggtgttgttgaac

SEQ ID NO: 23663 - DNA, 20 bp, synthetic construct
  source 1..20: mol_type = other DNA; note = Description of Artificial Sequence: Synthetic oligonucleotide
caagagacggtgttgttgaa

SEQ ID NO: 23664 - DNA, 20 bp, synthetic construct
  source 1..20: mol_type = other DNA; note = Description of Artificial Sequence: Synthetic oligonucleotide
acaagagacggtgttgttga

SEQ ID NO: 23665 - DNA, 20 bp, synthetic construct
  source 1..20: mol_type = other DNA; note = Description of Artificial Sequence: Synthetic oligonucleotide
tacaagagacggtgttgttg

SEQ ID NO: 23666 - DNA, 20 bp, synthetic construct
  source 1..20: mol_type = other DNA; note = Description of Artificial Sequence: Synthetic oligonucleotide
ctacaagagacggtgttgtt

SEQ ID NO: 23667 - DNA, 20 bp, synthetic construct
  source 1..20: mol_type = other DNA; note = Description of Artificial Sequence: Synthetic oligonucleotide
gctacaagagacggtgttgt

SEQ ID NO: 23668 - DNA, 20 bp, synthetic construct
  source 1..20: mol_type = other DNA; note = Description of Artificial Sequence: Synthetic oligonucleotide
tgctacaagagacggtgttg

SEQ ID NO: 23669 - DNA, 20 bp, synthetic construct
  source 1..20: mol_type = other DNA; note = Description of Artificial Sequence: Synthetic oligonucleotide
ttgctacaagagacggtgtt

SEQ ID NO: 23670 - DNA, 20 bp, synthetic construct
  source 1..20: mol_type = other DNA; note = Description of Artificial Sequence: Synthetic oligonucleotide
attgctacaagagacggtgt

SEQ ID NO: 23671 - DNA, 20 bp, synthetic construct
  source 1..20: mol_type = other DNA; note = Description of Artificial Sequence: Synthetic oligonucleotide
gattgctacaagagacggtg

SEQ ID NO: 23672 - DNA, 20 bp, synthetic construct
  source 1..20: mol_type = other DNA; note = Description of Artificial Sequence: Synthetic oligonucleotide
cgattgctacaagagacggt

SEQ ID NO: 23673 - DNA, 20 bp, synthetic construct
  source 1..20: mol_type = other DNA; note = Description of Artificial Sequence: Synthetic oligonucleotide
ccgattgctacaagagacgg

SEQ ID NO: 23674 - DNA, 20 bp, synthetic construct
  source 1..20: mol_type = other DNA; note = Description of Artificial Sequence: Synthetic oligonucleotide
gccgattgctacaagagacg

SEQ ID NO: 23675 - DNA, 20 bp, synthetic construct
  source 1..20: mol_type = other DNA; note = Description of Artificial Sequence: Synthetic oligonucleotide
ggccgattgctacaagagac

SEQ ID NO: 23676 - DNA, 20 bp, synthetic construct
  source 1..20: mol_type = other DNA; note = Description of Artificial Sequence: Synthetic oligonucleotide
tggccgattgctacaagaga

SEQ ID NO: 23677 - DNA, 20 bp, synthetic construct
  source 1..20: mol_type = other DNA; note = Description of Artificial Sequence: Synthetic oligonucleotide
gtggccgattgctacaagag

SEQ ID NO: 23678 - DNA, 20 bp, synthetic construct
  source 1..20: mol_type = other DNA; note = Description of Artificial Sequence: Synthetic oligonucleotide
tgtggccgattgctacaaga

SEQ ID NO: 23679 - DNA, 20 bp, synthetic construct
  source 1..20: mol_type = other DNA; note = Description of Artificial Sequence: Synthetic oligonucleotide
atgtggccgattgctacaag

SEQ ID NO: 23680 - DNA, 20 bp, synthetic construct
  source 1..20: mol_type = other DNA; note = Description of Artificial Sequence: Synthetic oligonucleotide
aatgtggccgattgctacaa

SEQ ID NO: 23681 - DNA, 20 bp, synthetic construct
  source 1..20: mol_type = other DNA; note = Description of Artificial Sequence: Synthetic oligonucleotide
caatgtggccgattgctaca

SEQ ID NO: 23682 - DNA, 20 bp, synthetic construct
  source 1..20: mol_type = other DNA; note = Description of Artificial Sequence: Synthetic oligonucleotide
gcaatgtggccgattgctac

SEQ ID NO: 23683 - DNA, 20 bp, synthetic construct
  source 1..20: mol_type = other DNA; note = Description of Artificial Sequence: Synthetic oligonucleotide
ggcaatgtggccgattgcta

SEQ ID NO: 23684 - DNA, 20 bp, synthetic construct
  source 1..20: mol_type = other DNA; note = Description of Artificial Sequence: Synthetic oligonucleotide
aggcaatgtggccgattgct

SEQ ID NO: 23685 - DNA, 20 bp, synthetic construct
  source 1..20: mol_type = other DNA; note = Description of Artificial Sequence: Synthetic oligonucleotide
aaggcaatgtggccgattgc

SEQ ID NO: 23686 - DNA, 20 bp, synthetic construct
  source 1..20: mol_type = other DNA; note = Description of Artificial Sequence: Synthetic oligonucleotide
taaggcaatgtggccgattg

SEQ ID NO: 23687 - DNA, 20 bp, synthetic construct
  source 1..20: mol_type = other DNA; note = Description of Artificial Sequence: Synthetic oligonucleotide
gtaaggcaatgtggccgatt

SEQ ID NO: 23688 - DNA, 20 bp, synthetic construct
  source 1..20: mol_type = other DNA; note = Description of Artificial Sequence: Synthetic oligonucleotide
agtaaggcaatgtggccgat

SEQ ID NO: 23689 - DNA, 20 bp, synthetic construct
  source 1..20: mol_type = other DNA; note = Description of Artificial Sequence: Synthetic oligonucleotide
cagtaaggcaatgtggccga

SEQ ID NO: 23690 - DNA, 20 bp, synthetic construct
  source 1..20: mol_type = other DNA; note = Description of Artificial Sequence: Synthetic oligonucleotide
tcagtaaggcaatgtggccg

SEQ ID NO: 23691 - DNA, 20 bp, synthetic construct
  source 1..20: mol_type = other DNA; note = Description of Artificial Sequence: Synthetic oligonucleotide
ttcagtaaggcaatgtggcc

SEQ ID NO: 23692 - DNA, 20 bp, synthetic construct
  source 1..20: mol_type = other DNA; note = Description of Artificial Sequence: Synthetic oligonucleotide
tttcagtaaggcaatgtggc

SEQ ID NO: 23693 - DNA, 20 bp, synthetic construct
  source 1..20: mol_type = other DNA; note = Description of Artificial Sequence: Synthetic oligonucleotide
atttcagtaaggcaatgtgg

SEQ ID NO: 23694 - DNA, 20 bp, synthetic construct
  source 1..20: mol_type = other DNA; note = Description of Artificial Sequence: Synthetic oligonucleotide
gatttcagtaaggcaatgtg

SEQ ID NO: 23695 - DNA, 20 bp, synthetic construct
  source 1..20: mol_type = other DNA; note = Description of Artificial Sequence: Synthetic oligonucleotide
ggatttcagtaaggcaatgt

SEQ ID NO: 23696 - DNA, 20 bp, synthetic construct
  source 1..20: mol_type = other DNA; note = Description of Artificial Sequence: Synthetic oligonucleotide
tggatttcagtaaggcaatg

SEQ ID NO: 23697 - DNA, 20 bp, synthetic construct
  source 1..20: mol_type = other DNA; note = Description of Artificial Sequence: Synthetic oligonucleotide
ctggatttcagtaaggcaat

SEQ ID NO: 23698 - DNA, 20 bp, synthetic construct
  source 1..20: mol_type = other DNA; note = Description of Artificial Sequence: Synthetic oligonucleotide
tctggatttcagtaaggcaa

SEQ ID NO: 23699 - DNA, 20 bp, synthetic construct
  source 1..20: mol_type = other DNA; note = Description of Artificial Sequence: Synthetic oligonucleotide
ctctggatttcagtaaggca

SEQ ID NO: 23700 - DNA, 20 bp, synthetic construct
  source 1..20: mol_type = other DNA; note = Description of Artificial Sequence: Synthetic oligonucleotide
gctctggatttcagtaaggc

SEQ ID NO: 23701 - DNA, 20 bp, synthetic construct
  source 1..20: mol_type = other DNA; note = Description of Artificial Sequence: Synthetic oligonucleotide
ggctctggatttcagtaagg

SEQ ID NO: 23702 - DNA, 20 bp, synthetic construct
  source 1..20: mol_type = other DNA; note = Description of Artificial Sequence: Synthetic oligonucleotide
aggctctggatttcagtaag

SEQ ID NO: 23703 - DNA, 20 bp, synthetic construct
  source 1..20: mol_type = other DNA; note = Description of Artificial Sequence: Synthetic oligonucleotide
taggctctggatttcagtaa

SEQ ID NO: 23704 - DNA, 20 bp, synthetic construct
  source 1..20: mol_type = other DNA; note = Description of Artificial Sequence: Synthetic oligonucleotide
ttaggctctggatttcagta

SEQ ID NO: 23705 - DNA, 20 bp, synthetic construct
  source 1..20: mol_type = other DNA; note = Description of Artificial Sequence: Synthetic oligonucleotide
gttaggctctggatttcagt

SEQ ID NO: 23706 - DNA, 20 bp, synthetic construct
  source 1..20: mol_type = other DNA; note = Description of Artificial Sequence: Synthetic oligonucleotide
ggttaggctctggatttcag

SEQ ID NO: 23707 - DNA, 20 bp, synthetic construct
  source 1..20: mol_type = other DNA; note = Description of Artificial Sequence: Synthetic oligonucleotide
aggttaggctctggatttca

SEQ ID NO: 23708 - DNA, 20 bp, synthetic construct
  source 1..20: mol_type = other DNA; note = Description of Artificial Sequence: Synthetic oligonucleotide
aaggttaggctctggatttc

SEQ ID NO: 23709 - DNA, 20 bp, synthetic construct
  source 1..20: mol_type = other DNA; note = Description of Artificial Sequence: Synthetic oligonucleotide
gaaggttaggctctggattt

SEQ ID NO: 23710 - DNA, 20 bp, synthetic construct
  source 1..20: mol_type = other DNA; note = Description of Artificial Sequence: Synthetic oligonucleotide
tgaaggttaggctctggatt

SEQ ID NO: 23711 - DNA, 20 bp, synthetic construct
  source 1..20: mol_type = other DNA; note = Description of Artificial Sequence: Synthetic oligonucleotide
ttgaaggttaggctctggat

SEQ ID NO: 23712 - DNA, 20 bp, synthetic construct
  source 1..20: mol_type = other DNA; note = Description of Artificial Sequence: Synthetic oligonucleotide
attgaaggttaggctctgga

SEQ ID NO: 23713 - DNA, 20 bp, synthetic construct
  source 1..20: mol_type = other DNA; note = Description of Artificial Sequence: Synthetic oligonucleotide
gattgaaggttaggctctgg

SEQ ID NO: 23714 - DNA, 20 bp, synthetic construct
  source 1..20: mol_type = other DNA; note = Description of Artificial Sequence: Synthetic oligonucleotide
ggattgaaggttaggctctg

SEQ ID NO: 23715 - DNA, 20 bp, synthetic construct
  source 1..20: mol_type = other DNA; note = Description of Artificial Sequence: Synthetic oligonucleotide
gggattgaaggttaggctct

SEQ ID NO: 23716 - DNA, 20 bp, synthetic construct
  source 1..20: mol_type = other DNA; note = Description of Artificial Sequence: Synthetic oligonucleotide
tgggattgaaggttaggctc

SEQ ID NO: 23717 - DNA, 20 bp, synthetic construct
  source 1..20: mol_type = other DNA; note = Description of Artificial Sequence: Synthetic oligonucleotide
gtgggattgaaggttaggct

SEQ ID NO: 23718 - DNA, 20 bp, synthetic construct
  source 1..20: mol_type = other DNA; note = Description of Artificial Sequence: Synthetic oligonucleotide
ggtgggattgaaggttaggc

SEQ ID NO: 23719 - DNA, 20 bp, synthetic construct
  source 1..20: mol_type = other DNA; note = Description of Artificial Sequence: Synthetic oligonucleotide
cggtgggattgaaggttagg

SEQ ID NO: 23720 - DNA, 20 bp, synthetic construct
  source 1..20: mol_type = other DNA; note = Description of Artificial Sequence: Synthetic oligonucleotide
gcggtgggattgaaggttag

SEQ ID NO: 23721 - DNA, 20 bp, synthetic construct
  source 1..20: mol_type = other DNA; note = Description of Artificial Sequence: Synthetic oligonucleotide
ggcggtgggattgaaggtta

SEQ ID NO: 23722 - DNA, 20 bp, synthetic construct
  source 1..20: mol_type = other DNA; note = Description of Artificial Sequence: Synthetic oligonucleotide
cggcggtgggattgaaggtt

SEQ ID NO: 23723 - DNA, 20 bp, synthetic construct
  source 1..20: mol_type = other DNA; note = Description of Artificial Sequence: Synthetic oligonucleotide
ccggcggtgggattgaaggt

SEQ ID NO: 23724 - DNA, 20 bp, synthetic construct
  source 1..20: mol_type = other DNA; note = Description of Artificial Sequence: Synthetic oligonucleotide
gccggcggtgggattgaagg

SEQ ID NO: 23725 - DNA, 20 bp, synthetic construct
  source 1..20: mol_type = other DNA; note = Description of Artificial Sequence: Synthetic oligonucleotide
agccggcggtgggattgaag

SEQ ID NO: 23726 - DNA, 20 bp, synthetic construct
  source 1..20: mol_type = other DNA; note = Description of Artificial Sequence: Synthetic oligonucleotide
cagccggcggtgggattgaa

SEQ ID NO: 23727 - DNA, 20 bp, synthetic construct
  source 1..20: mol_type = other DNA; note = Description of Artificial Sequence: Synthetic oligonucleotide
gcagccggcggtgggattga

SEQ ID NO: 23728 - DNA, 20 bp, synthetic construct
  source 1..20: mol_type = other DNA; note = Description of Artificial Sequence: Synthetic oligonucleotide
cgcagccggcggtgggattg

SEQ ID NO: 23729 - DNA, 20 bp, synthetic construct
  source 1..20: mol_type = other DNA; note = Description of Artificial Sequence: Synthetic oligonucleotide
gcgcagccggcggtgggatt

SEQ ID NO: 23730 - DNA, 20 bp, synthetic construct
  source 1..20: mol_type = other DNA; note = Description of Artificial Sequence: Synthetic oligonucleotide
cgcgcagccggcggtgggat

SEQ ID NO: 23731 - DNA, 20 bp, synthetic construct
  source 1..20: mol_type = other DNA; note = Description of Artificial Sequence: Synthetic oligonucleotide
acgcgcagccggcggtggga

SEQ ID NO: 23732 - DNA, 20 bp, synthetic construct
  source 1..20: mol_type = other DNA; note = Description of Artificial Sequence: Synthetic oligonucleotide
gacgcgcagccggcggtggg

SEQ ID NO: 23733 - DNA, 20 bp, synthetic construct
  source 1..20: mol_type = other DNA; note = Description of Artificial Sequence: Synthetic oligonucleotide
cgacgcgcagccggcggtgg

SEQ ID NO: 23734 - DNA, 20 bp, synthetic construct
  source 1..20: mol_type = other DNA; note = Description of Artificial Sequence: Synthetic oligonucleotide
gcgacgcgcagccggcggtg

SEQ ID NO: 23735 - DNA, 20 bp, synthetic construct
  source 1..20: mol_type = other DNA; note = Description of Artificial Sequence: Synthetic oligonucleotide
agcgacgcgcagccggcggt

SEQ ID NO: 23736 - DNA, 20 bp, synthetic construct
  source 1..20: mol_type = other DNA; note = Description of Artificial Sequence: Synthetic oligonucleotide
gagcgacgcgcagccggcgg

SEQ ID NO: 23737 - DNA, 20 bp, synthetic construct
  source 1..20: mol_type = other DNA; note = Description of Artificial Sequence: Synthetic oligonucleotide
cgagcgacgcgcagccggcg

SEQ ID NO: 23738 - DNA, 20 bp, synthetic construct
  source 1..20: mol_type = other DNA; note = Description of Artificial Sequence: Synthetic oligonucleotide
gcgagcgacgcgcagccggc

SEQ ID NO: 23739 - DNA, 20 bp, synthetic construct
  source 1..20: mol_type = other DNA; note = Description of Artificial Sequence: Synthetic oligonucleotide
ggcgagcgacgcgcagccgg

SEQ ID NO: 23740 - DNA, 20 bp, synthetic construct
  source 1..20: mol_type = other DNA; note = Description of Artificial Sequence: Synthetic oligonucleotide
tggcgagcgacgcgcagccg

SEQ ID NO: 23741 - DNA, 20 bp, synthetic construct
  source 1..20: mol_type = other DNA; note = Description of Artificial Sequence: Synthetic oligonucleotide
ttggcgagcgacgcgcagcc

SEQ ID NO: 23742 - DNA, 20 bp, synthetic construct
  source 1..20: mol_type = other DNA; note = Description of Artificial Sequence: Synthetic oligonucleotide
tttggcgagcgacgcgcagc

SEQ ID NO: 23743 - DNA, 20 bp, synthetic construct
  source 1..20: mol_type = other DNA; note = Description of Artificial Sequence: Synthetic oligonucleotide
ctttggcgagcgacgcgcag

SEQ ID NO: 23744 - DNA, 20 bp, synthetic construct
  source 1..20: mol_type = other DNA; note = Description of Artificial Sequence: Synthetic oligonucleotide
tctttggcgagcgacgcgca

SEQ ID NO: 23745 - DNA, 20 bp, synthetic construct
  source 1..20: mol_type = other DNA; note = Description of Artificial Sequence: Synthetic oligonucleotide
ttctttggcgagcgacgcgc

SEQ ID NO: 23746 - DNA, 20 bp, synthetic construct
  source 1..20: mol_type = other DNA; note = Description of Artificial Sequence: Synthetic oligonucleotide
tttctttggcgagcgacgcg

SEQ ID NO: 23747 - DNA, 20 bp, synthetic construct
  source 1..20: mol_type = other DNA; note = Description of Artificial Sequence: Synthetic oligonucleotide
atttctttggcgagcgacgc

SEQ ID NO: 23748 - DNA, 20 bp, synthetic construct
  source 1..20: mol_type = other DNA; note = Description of Artificial Sequence: Synthetic oligonucleotide
catttctttggcgagcgacg

SEQ ID NO: 23749 - DNA, 20 bp, synthetic construct
  source 1..20: mol_type = other DNA; note = Description of Artificial Sequence: Synthetic oligonucleotide
acatttctttggcgagcgac

SEQ ID NO: 23750 - DNA, 20 bp, synthetic construct
  source 1..20: mol_type = other DNA; note = Description of Artificial Sequence: Synthetic oligonucleotide
aacatttctttggcgagcga

SEQ ID NO: 23751 - DNA, 20 bp, synthetic construct
  source 1..20: mol_type = other DNA; note = Description of Artificial Sequence: Synthetic oligonucleotide
gaacatttctttggcgagcg

SEQ ID NO: 23752 - DNA, 20 bp, synthetic construct
  source 1..20: mol_type = other DNA; note = Description of Artificial Sequence: Synthetic oligonucleotide
cgaacatttctttggcgagc

SEQ ID NO: 23753 - DNA, 20 bp, synthetic construct
  source 1..20: mol_type = other DNA; note = Description of Artificial Sequence: Synthetic oligonucleotide
gcgaacatttctttggcgag

SEQ ID NO: 23754 - DNA, 20 bp, synthetic construct
  source 1..20: mol_type = other DNA; note = Description of Artificial Sequence: Synthetic oligonucleotide
ggcgaacatttctttggcga

SEQ ID NO: 23755 - DNA, 20 bp, synthetic construct
  source 1..20: mol_type = other DNA; note = Description of Artificial Sequence: Synthetic oligonucleotide
tggcgaacatttctttggcg

SEQ ID NO: 23756 - DNA, 20 bp, synthetic construct
  source 1..20: mol_type = other DNA; note = Description of Artificial Sequence: Synthetic oligonucleotide
atggcgaacatttctttggc

SEQ ID NO: 23757 - DNA, 20 bp, synthetic construct
  source 1..20: mol_type = other DNA; note = Description of Artificial Sequence: Synthetic oligonucleotide
catggcgaacatttctttgg

SEQ ID NO: 23758 - DNA, 20 bp, synthetic construct
  source 1..20: mol_type = other DNA; note = Description of Artificial Sequence: Synthetic oligonucleotide
tcatggcgaacatttctttg

SEQ ID NO: 23759 - DNA, 20 bp, synthetic construct
  source 1..20: mol_type = other DNA; note = Description of Artificial Sequence: Synthetic oligonucleotide
ttcatggcgaacatttcttt

SEQ ID NO: 23760 - DNA, 20 bp, synthetic construct
  source 1..20: mol_type = other DNA; note = Description of Artificial Sequence: Synthetic oligonucleotide
tttcatggcgaacatttctt

SEQ ID NO: 23761 - DNA, 20 bp, synthetic construct
  source 1..20: mol_type = other DNA; note = Description of Artificial Sequence: Synthetic oligonucleotide
ttttcatggcgaacatttct

SEQ ID NO: 23762 - DNA, 20 bp, synthetic construct
  source 1..20: mol_type = other DNA; note = Description of Artificial Sequence: Synthetic oligonucleotide
gttttcatggcgaacatttc

SEQ ID NO: 23763 - DNA, 20 bp, synthetic construct
  source 1..20: mol_type = other DNA; note = Description of Artificial Sequence: Synthetic oligonucleotide
agttttcatggcgaacattt

SEQ ID NO: 23764 - DNA, 20 bp, synthetic construct
  source 1..20: mol_type = other DNA; note = Description of Artificial Sequence: Synthetic oligonucleotide
tagttttcatggcgaacatt

SEQ ID NO: 23765 - DNA, 20 bp, synthetic construct
  source 1..20: mol_type = other DNA; note = Description of Artificial Sequence: Synthetic oligonucleotide
ttagttttcatggcgaacat

SEQ ID NO: 23766 - DNA, 20 bp, synthetic construct
  source 1..20: mol_type = other DNA; note = Description of Artificial Sequence: Synthetic oligonucleotide
cttagttttcatggcgaaca

SEQ ID NO: 23767 - DNA, 20 bp, synthetic construct
  source 1..20: mol_type = other DNA; note = Description of Artificial Sequence: Synthetic oligonucleotide
ccttagttttcatggcgaac

SEQ ID NO: 23768 - DNA, 20 bp, synthetic construct
  source 1..20: mol_type = other DNA; note = Description of Artificial Sequence: Synthetic oligonucleotide
gccttagttttcatggcgaa

SEQ ID NO: 23769 - DNA, 20 bp, synthetic construct
  source 1..20: mol_type = other DNA; note = Description of Artificial Sequence: Synthetic oligonucleotide
agccttagttttcatggcga

SEQ ID NO: 23770 - DNA, 20 bp, synthetic construct
  source 1..20: mol_type = other DNA; note = Description of Artificial Sequence: Synthetic oligonucleotide
cagccttagttttcatggcg

SEQ ID NO: 23771 - DNA, 20 bp, synthetic construct
  source 1..20: mol_type = other DNA; note = Description of Artificial Sequence: Synthetic oligonucleotide
gcagccttagttttcatggc

SEQ ID NO: 23772 - DNA, 20 bp, synthetic construct
  source 1..20: mol_type = other DNA; note = Description of Artificial Sequence: Synthetic oligonucleotide
ggcagccttagttttcatgg

SEQ ID NO: 23773 - DNA, 20 bp, synthetic construct
  source 1..20: mol_type = other DNA; note = Description of Artificial Sequence: Synthetic oligonucleotide
aggcagccttagttttcatg

SEQ ID NO: 23774 - DNA, 20 bp, synthetic construct
  source 1..20: mol_type = other DNA; note = Description of Artificial Sequence: Synthetic oligonucleotide
aaggcagccttagttttcat

SEQ ID NO: 23775 - DNA, 20 bp, synthetic construct
  source 1..20: mol_type = other DNA; note = Description of Artificial Sequence: Synthetic oligonucleotide
taaggcagccttagttttca

SEQ ID NO: 23776 - DNA, 20 bp, synthetic construct
  source 1..20: mol_type = other DNA; note = Description of Artificial Sequence: Synthetic oligonucleotide
ctaaggcagccttagttttc

SEQ ID NO: 23777 - DNA, 20 bp, synthetic construct
  source 1..20: mol_type = other DNA; note = Description of Artificial Sequence: Synthetic oligonucleotide
gctaaggcagccttagtttt

SEQ ID NO: 23778 - DNA, 20 bp, synthetic construct
  source 1..20: mol_type = other DNA; note = Description of Artificial Sequence: Synthetic oligonucleotide
agctaaggcagccttagttt

SEQ ID NO: 23779 - DNA, 20 bp, synthetic construct
  source 1..20: mol_type = other DNA; note = Description of Artificial Sequence: Synthetic oligonucleotide
tagctaaggcagccttagtt

SEQ ID NO: 23780 - DNA, 20 bp, synthetic construct
  source 1..20: mol_type = other DNA; note = Description of Artificial Sequence: Synthetic oligonucleotide
atagctaaggcagccttagt

SEQ ID NO: 23781 - DNA, 20 bp, synthetic construct
  source 1..20: mol_type = other DNA; note = Description of Artificial Sequence: Synthetic oligonucleotide
gatagctaaggcagccttag

SEQ ID NO: 23782 - DNA, 20 bp, synthetic construct
  source 1..20: mol_type = other DNA; note = Description of Artificial Sequence: Synthetic oligonucleotide
agatagctaaggcagcctta

SEQ ID NO: 23783 - DNA, 20 bp, synthetic construct
  source 1..20: mol_type = other DNA; note = Description of Artificial Sequence: Synthetic oligonucleotide
cagatagctaaggcagcctt

SEQ ID NO: 23784 - DNA, 20 bp, synthetic construct
  source 1..20: mol_type = other DNA; note = Description of Artificial Sequence: Synthetic oligonucleotide
ccagatagctaaggcagcct

SEQ ID NO: 23785 - DNA, 20 bp, synthetic construct
  source 1..20: mol_type = other DNA; note = Description of Artificial Sequence: Synthetic oligonucleotide
accagatagctaaggcagcc

SEQ ID NO: 23786 - DNA, 20 bp, synthetic construct
  source 1..20: mol_type = other DNA; note = Description of Artificial Sequence: Synthetic oligonucleotide
caccagatagctaaggcagc

SEQ ID NO: 23787 - DNA, 20 bp, synthetic construct
  source 1..20: mol_type = other DNA; note = Description of Artificial Sequence: Synthetic oligonucleotide
gcaccagatagctaaggcag

SEQ ID NO: 23788 - DNA, 20 bp, synthetic construct
  source 1..20: mol_type = other DNA; note = Description of Artificial Sequence: Synthetic oligonucleotide
ggcaccagatagctaaggca

SEQ ID NO: 23789 - DNA, 20 bp, synthetic construct
  source 1..20: mol_type = other DNA; note = Description of Artificial Sequence: Synthetic oligonucleotide
gggcaccagatagctaaggc

SEQ ID NO: 23790 - DNA, 20 bp, synthetic construct
  source 1..20: mol_type = other DNA; note = Description of Artificial Sequence: Synthetic oligonucleotide
tgggcaccagatagctaagg

SEQ ID NO: 23791 - DNA, 20 bp, synthetic construct
  source 1..20: mol_type = other DNA; note = Description of Artificial Sequence: Synthetic oligonucleotide
ctgggcaccagatagctaag

SEQ ID NO: 23792 - DNA, 20 bp, synthetic construct
  source 1..20: mol_type = other DNA; note = Description of Artificial Sequence: Synthetic oligonucleotide
cctgggcaccagatagctaa

SEQ ID NO: 23793 - DNA, 20 bp, synthetic construct
  source 1..20: mol_type = other DNA; note = Description of Artificial Sequence: Synthetic oligonucleotide
gcctgggcaccagatagcta

SEQ ID NO: 23794 - DNA, 20 bp, synthetic construct
  source 1..20: mol_type = other DNA; note = Description of Artificial Sequence: Synthetic oligonucleotide
agcctgggcaccagatagct

SEQ ID NO: 23795 - DNA, 20 bp, synthetic construct
  source 1..20: mol_type = other DNA; note = Description of Artificial Sequence: Synthetic oligonucleotide
tagcctgggcaccagatagc

SEQ ID NO: 23796 - DNA, 20 bp, synthetic construct
  source 1..20: mol_type = other DNA; note = Description of Artificial Sequence: Synthetic oligonucleotide
atagcctgggcaccagatag

SEQ ID NO: 23797 - DNA, 20 bp, synthetic construct
  source 1..20: mol_type = other DNA; note = Description of Artificial Sequence: Synthetic oligonucleotide
aatagcctgggcaccagata

SEQ ID NO: 23798 - DNA, 20 bp, synthetic construct
  source 1..20: mol_type = other DNA; note = Description of Artificial Sequence: Synthetic oligonucleotide
gaatagcctgggcaccagat

SEQ ID NO: 23799 - DNA, 20 bp, synthetic construct
  source 1..20: mol_type = other DNA; note = Description of Artificial Sequence: Synthetic oligonucleotide
cgaatagcctgggcaccaga

SEQ ID NO: 23800 - DNA, 20 bp, synthetic construct
  source 1..20: mol_type = other DNA; note = Description of Artificial Sequence: Synthetic oligonucleotide
ccgaatagcctgggcaccag

SEQ ID NO: 23801 - DNA, 20 bp, synthetic construct
  source 1..20: mol_type = other DNA; note = Description of Artificial Sequence: Synthetic oligonucleotide
tccgaatagcctgggcacca

SEQ ID NO: 23802 - DNA, 20 bp, synthetic construct
  source 1..20: mol_type = other DNA; note = Description of Artificial Sequence: Synthetic oligonucleotide
ttccgaatagcctgggcacc

SEQ ID NO: 23803 - DNA, 20 bp, synthetic construct
  source 1..20: mol_type = other DNA; note = Description of Artificial Sequence: Synthetic oligonucleotide
tttccgaatagcctgggcac

SEQ ID NO: 23804 - DNA, 20 bp, synthetic construct
  source 1..20: mol_type = other DNA; note = Description of Artificial Sequence: Synthetic oligonucleotide
gtttccgaatagcctgggca

SEQ ID NO: 23805 - DNA, 20 bp, synthetic construct
  source 1..20: mol_type = other DNA; note = Description of Artificial Sequence: Synthetic oligonucleotide
agtttccgaatagcctgggc

SEQ ID NO: 23806 - DNA, 20 bp, synthetic construct
  source 1..20: mol_type = other DNA; note = Description of Artificial Sequence: Synthetic oligonucleotide
gagtttccgaatagcctggg

SEQ ID NO: 23807 - DNA, 20 bp, synthetic construct
  source 1..20: mol_type = other DNA; note = Description of Artificial Sequence: Synthetic oligonucleotide
tgagtttccgaatagcctgg

SEQ ID NO: 23808 - DNA, 20 bp, synthetic construct
  source 1..20: mol_type = other DNA; note = Description of Artificial Sequence: Synthetic oligonucleotide
ctgagtttccgaatagcctg

SEQ ID NO: 23809 - DNA, 20 bp, synthetic construct
  source 1..20: mol_type = other DNA; note = Description of Artificial Sequence: Synthetic oligonucleotide
tctgagtttccgaatagcct

SEQ ID NO: 23810 - DNA, 20 bp, synthetic construct
  source 1..20: mol_type = other DNA; note = Description of Artificial Sequence: Synthetic oligonucleotide
atctgagtttccgaatagcc

SEQ ID NO: 23811 - DNA, 20 bp, synthetic construct
  source 1..20: mol_type = other DNA; note = Description of Artificial Sequence: Synthetic oligonucleotide
tatctgagtttccgaatagc

SEQ ID NO: 23812 - DNA, 20 bp, synthetic construct
  source 1..20: mol_type = other DNA; note = Description of Artificial Sequence: Synthetic oligonucleotide
ttatctgagtttccgaatag

SEQ ID NO: 23813 - DNA, 20 bp, synthetic construct
  source 1..20: mol_type = other DNA; note = Description of Artificial Sequence: Synthetic oligonucleotide
tttatctgagtttccgaata

SEQ ID NO: 23814 - DNA, 20 bp, synthetic construct
  source 1..20: mol_type = other DNA; note = Description of Artificial Sequence: Synthetic oligonucleotide
atttatctgagtttccgaat

SEQ ID NO: 23815 - DNA, 20 bp, synthetic construct
  source 1..20: mol_type = other DNA; note = Description of Artificial Sequence: Synthetic oligonucleotide
catttatctgagtttccgaa

SEQ ID NO: 23816 - DNA, 20 bp, synthetic construct
  source 1..20: mol_type = other DNA; note = Description of Artificial Sequence: Synthetic oligonucleotide
gcatttatctgagtttccga

SEQ ID NO: 23817 - DNA, 20 bp, synthetic construct
  source 1..20: mol_type = other DNA; note = Description of Artificial Sequence: Synthetic oligonucleotide
agcatttatctgagtttccg

SEQ ID NO: 23818 - DNA, 20 bp, synthetic construct
  source 1..20: mol_type = other DNA; note = Description of Artificial Sequence: Synthetic oligonucleotide
tagcatttatctgagtttcc

SEQ ID NO: 23819 - DNA, 20 bp, synthetic construct
  source 1..20: mol_type = other DNA; note = Description of Artificial Sequence: Synthetic oligonucleotide
gtagcatttatctgagtttc

SEQ ID NO: 23820 - DNA, 20 bp, synthetic construct
  source 1..20: mol_type = other DNA; note = Description of Artificial Sequence: Synthetic oligonucleotide
agtagcatttatctgagttt

SEQ ID NO: 23821 - DNA, 20 bp, synthetic construct
  source 1..20: mol_type = other DNA; note = Description of Artificial Sequence: Synthetic oligonucleotide
gagtagcatttatctgagtt

SEQ ID NO: 23822 - DNA, 20 bp, synthetic construct
  source 1..20: mol_type = other DNA; note = Description of Artificial Sequence: Synthetic oligonucleotide
tgagtagcatttatctgagt

SEQ ID NO: 23823 - DNA, 20 bp, synthetic construct
  source 1..20: mol_type = other DNA; note = Description of Artificial Sequence: Synthetic oligonucleotide
ctgagtagcatttatctgag

SEQ ID NO: 23824 - DNA, 20 bp, synthetic construct
  source 1..20: mol_type = other DNA; note = Description of Artificial Sequence: Synthetic oligonucleotide
cctgagtagcatttatctga

SEQ ID NO: 23825 - DNA, 20 bp, synthetic construct
  source 1..20: mol_type = other DNA; note = Description of Artificial Sequence: Synthetic oligonucleotide
gcctgagtagcatttatctg

SEQ ID NO: 23826 - DNA, 20 bp, synthetic construct
  source 1..20: mol_type = other DNA; note = Description of Artificial Sequence: Synthetic oligonucleotide
tgcctgagtagcatttatct

SEQ ID NO: 23827 - DNA, 20 bp, synthetic construct
  source 1..20: mol_type = other DNA; note = Description of Artificial Sequence: Synthetic oligonucleotide
ttgcctgagtagcatttatc

SEQ ID NO: 23828 - DNA, 20 bp, synthetic construct
  source 1..20: mol_type = other DNA; note = Description of Artificial Sequence: Synthetic oligonucleotide
attgcctgagtagcatttat

SEQ ID NO: 23829 - DNA, 20 bp, synthetic construct
  source 1..20: mol_type = other DNA; note = Description of Artificial Sequence: Synthetic oligonucleotide
cattgcctgagtagcattta

SEQ ID NO: 23830 - DNA, 20 bp, synthetic construct
  source 1..20: mol_type = other DNA; note = Description of Artificial Sequence: Synthetic oligonucleotide
tcattgcctgagtagcattt

SEQ ID NO: 23831 - DNA, 20 bp, synthetic construct
  source 1..20: mol_type = other DNA; note = Description of Artificial Sequence: Synthetic oligonucleotide
ttcattgcctgagtagcatt

SEQ ID NO: 23832 - DNA, 20 bp, synthetic construct
  source 1..20: mol_type = other DNA; note = Description of Artificial Sequence: Synthetic oligonucleotide
cttcattgcctgagtagcat

SEQ ID NO: 23833 - DNA, 20 bp, synthetic construct
  source 1..20: mol_type = other DNA; note = Description of Artificial Sequence: Synthetic oligonucleotide
tcttcattgcctgagtagca

SEQ ID NO: 23834 - DNA, 20 bp, synthetic construct
  source 1..20: mol_type = other DNA; note = Description of Artificial Sequence: Synthetic oligonucleotide
ttcttcattgcctgagtagc

SEQ ID NO: 23835 - DNA, 20 bp, synthetic construct
  source 1..20: mol_type = other DNA; note = Description of Artificial Sequence: Synthetic oligonucleotide
cttcttcattgcctgagtag

SEQ ID NO: 23836 - DNA, 20 bp, synthetic construct
  source 1..20: mol_type = other DNA; note = Description of Artificial Sequence: Synthetic oligonucleotide
tcttcttcattgcctgagta

SEQ ID NO: 23837 - DNA, 20 bp, synthetic construct
  source 1..20: mol_type = other DNA; note = Description of Artificial Sequence: Synthetic oligonucleotide
ctcttcttcattgcctgagt

SEQ ID NO: 23838 - DNA, 20 bp, synthetic construct
  source 1..20: mol_type = other DNA; note = Description of Artificial Sequence: Synthetic oligonucleotide
cctcttcttcattgcctgag

SEQ ID NO: 23839 - DNA, 20 bp, synthetic construct
  source 1..20: mol_type = other DNA; note = Description of Artificial Sequence: Synthetic oligonucleotide
tcctcttcttcattgcctga

SEQ ID NO: 23840 - DNA, 20 bp, synthetic construct
  source 1..20: mol_type = other DNA; note = Description of Artificial Sequence: Synthetic oligonucleotide
ctcctcttcttcattgcctg

SEQ ID NO: 23841 - DNA, 20 bp, synthetic construct
  source 1..20: mol_type = other DNA; note = Description of Artificial Sequence: Synthetic oligonucleotide
tctcctcttcttcattgcct

SEQ ID NO: 23842 - DNA, 20 bp, synthetic construct
  source 1..20: mol_type = other DNA; note = Description of Artificial Sequence: Synthetic oligonucleotide
ttctcctcttcttcattgcc

SEQ ID NO: 23843 - DNA, 20 bp, synthetic construct
  source 1..20: mol_type = other DNA; note = Description of Artificial Sequence: Synthetic oligonucleotide
tttctcctcttcttcattgc

SEQ ID NO: 23844 - DNA, 20 bp, synthetic construct
  source 1..20: mol_type = other DNA; note = Description of Artificial Sequence: Synthetic oligonucleotide
ttttctcctcttcttcattg

SEQ ID NO: 23845 - DNA, 20 bp, synthetic construct
  source 1..20: mol_type = other DNA; note = Description of Artificial Sequence: Synthetic oligonucleotide
tttttctcctcttcttcatt

SEQ ID NO: 23846 - DNA, 20 bp, synthetic construct
  source 1..20: mol_type = other DNA; note = Description of Artificial Sequence: Synthetic oligonucleotide
ctttttctcctcttcttcat

SEQ ID NO: 23847 - DNA, 20 bp, synthetic construct
  source 1..20: mol_type = other DNA; note = Description of Artificial Sequence: Synthetic oligonucleotide
cctttttctcctcttcttca

SEQ ID NO: 23848 - DNA, 20 bp, synthetic construct
  source 1..20: mol_type = other DNA; note = Description of Artificial Sequence: Synthetic oligonucleotide
tcctttttctcctcttcttc

SEQ ID NO: 23849 - DNA, 20 bp, synthetic construct
  source 1..20: mol_type = other DNA; note = Description of Artificial Sequence: Synthetic oligonucleotide
ttcctttttctcctcttctt

SEQ ID NO: 23850 - DNA, 20 bp, synthetic construct
  source 1..20: mol_type = other DNA; note = Description of Artificial Sequence: Synthetic oligonucleotide
tttcctttttctcctcttct

SEQ ID NO: 23851 - DNA, 20 bp, synthetic construct
  source 1..20: mol_type = other DNA; note = Description of Artificial Sequence: Synthetic oligonucleotide
ctttcctttttctcctcttc

SEQ ID NO: 23852 - DNA, 20 bp, synthetic construct
  source 1..20: mol_type = other DNA; note = Description of Artificial Sequence: Synthetic oligonucleotide
actttcctttttctcctctt

SEQ ID NO: 23853 - DNA, 20 bp, synthetic construct
  source 1..20: mol_type = other DNA; note = Description of Artificial Sequence: Synthetic oligonucleotide
gactttcctttttctcctct

SEQ ID NO: 23854 - DNA, 20 bp, synthetic construct
  source 1..20: mol_type = other DNA; note = Description of Artificial Sequence: Synthetic oligonucleotide
tgactttcctttttctcctc

SEQ ID NO: 23855 - DNA, 20 bp, synthetic construct
  source 1..20: mol_type = other DNA; note = Description of Artificial Sequence: Synthetic oligonucleotide
gtgactttcctttttctcct

SEQ ID NO: 23856 - DNA, 20 bp, synthetic construct
  source 1..20: mol_type = other DNA; note = Description of Artificial Sequence: Synthetic oligonucleotide
tgtgactttcctttttctcc

SEQ ID NO: 23857 - DNA, 20 bp, synthetic construct
  source 1..20: mol_type = other DNA; note = Description of Artificial Sequence: Synthetic oligonucleotide
ttgtgactttcctttttctc

SEQ ID NO: 23858 - DNA, 20 bp, synthetic construct
  source 1..20: mol_type = other DNA; note = Description of Artificial Sequence: Synthetic oligonucleotide
gttgtgactttcctttttct

SEQ ID NO: 23859 - DNA, 20 bp, synthetic construct
  source 1..20: mol_type = other DNA; note = Description of Artificial Sequence: Synthetic oligonucleotide
ggttgtgactttcctttttc

SEQ ID NO: 23860 - DNA, 20 bp, synthetic construct
  source 1..20: mol_type = other DNA; note = Description of Artificial Sequence: Synthetic oligonucleotide
tggttgtgactttccttttt

SEQ ID NO: 23861 - DNA, 20 bp, synthetic construct
  source 1..20: mol_type = other DNA; note = Description of Artificial Sequence: Synthetic oligonucleotide
ttggttgtgactttcctttt

SEQ ID NO: 23862 - DNA, 20 bp, synthetic construct
  source 1..20: mol_type = other DNA; note = Description of Artificial Sequence: Synthetic oligonucleotide
attggttgtgactttccttt

SEQ ID NO: 23863 - DNA, 20 bp, synthetic construct
  source 1..20: mol_type = other DNA; note = Description of Artificial Sequence: Synthetic oligonucleotide
tattggttgtgactttcctt

SEQ ID NO: 23864 - DNA, 20 bp, synthetic construct
  source 1..20: mol_type = other DNA; note = Description of Artificial Sequence: Synthetic oligonucleotide
ttattggttgtgactttcct

SEQ ID NO: 23865 - DNA, 20 bp, synthetic construct
  source 1..20: mol_type = other DNA; note = Description of Artificial Sequence: Synthetic oligonucleotide
tttattggttgtgactttcc

SEQ ID NO: 23866 - DNA, 20 bp, synthetic construct
  source 1..20: mol_type = other DNA; note = Description of Artificial Sequence: Synthetic oligonucleotide
atttattggttgtgactttc

SEQ ID NO: 23867 - DNA, 20 bp, synthetic construct
  source 1..20: mol_type = other DNA; note = Description of Artificial Sequence: Synthetic oligonucleotide
catttattggttgtgacttt

SEQ ID NO: 23868 - DNA, 20 bp, synthetic construct
  source 1..20: mol_type = other DNA; note = Description of Artificial Sequence: Synthetic oligonucleotide
acatttattggttgtgactt

SEQ ID NO: 23869 - DNA, 20 bp, synthetic construct
  source 1..20: mol_type = other DNA; note = Description of Artificial Sequence: Synthetic oligonucleotide
gacatttattggttgtgact

SEQ ID NO: 23870 - DNA, 20 bp, synthetic construct
  source 1..20: mol_type = other DNA; note = Description of Artificial Sequence: Synthetic oligonucleotide
agacatttattggttgtgac

SEQ ID NO: 23871 - DNA, 20 bp, synthetic construct
  source 1..20: mol_type = other DNA; note = Description of Artificial Sequence: Synthetic oligonucleotide
cagacatttattggttgtga

SEQ ID NO: 23872 - DNA, 20 bp, synthetic construct
  source 1..20: mol_type = other DNA; note = Description of Artificial Sequence: Synthetic oligonucleotide
ccagacatttattggttgtg

SEQ ID NO: 23873 - DNA, 20 bp, synthetic construct
  source 1..20: mol_type = other DNA; note = Description of Artificial Sequence: Synthetic oligonucleotide
tccagacatttattggttgt

SEQ ID NO: 23874 - DNA, 20 bp, synthetic construct
  source 1..20: mol_type = other DNA; note = Description of Artificial Sequence: Synthetic oligonucleotide
ttccagacatttattggttg

SEQ ID NO: 23875 - DNA, 20 bp, synthetic construct
  source 1..20: mol_type = other DNA; note = Description of Artificial Sequence: Synthetic oligonucleotide
gttccagacatttattggtt

SEQ ID NO: 23876 - DNA, 20 bp, synthetic construct
  source 1..20: mol_type = other DNA; note = Description of Artificial Sequence: Synthetic oligonucleotide
tgttccagacatttattggt

SEQ ID NO: 23877 - DNA, 20 bp, synthetic construct
  source 1..20: mol_type = other DNA; note = Description of Artificial Sequence: Synthetic oligonucleotide
ttgttccagacatttattgg

SEQ ID NO: 23878 - DNA, 20 bp, synthetic construct
  source 1..20: mol_type = other DNA; note = Description of Artificial Sequence: Synthetic oligonucleotide
cttgttccagacatttattg

SEQ ID NO: 23879 - DNA, 20 bp, synthetic construct
  source 1..20: mol_type = other DNA; note = Description of Artificial Sequence: Synthetic oligonucleotide
acttgttccagacatttatt

SEQ ID NO: 23880 - DNA, 20 bp, synthetic construct
  source 1..20: mol_type = other DNA; note = Description of Artificial Sequence: Synthetic oligonucleotide
cacttgttccagacatttat

SEQ ID NO: 23881 - DNA, 20 bp, synthetic construct
  source 1..20: mol_type = other DNA; note = Description of Artificial Sequence: Synthetic oligonucleotide
acacttgttccagacattta

SEQ ID NO: 23882 - DNA, 20 bp, synthetic construct
  source 1..20: mol_type = other DNA; note = Description of Artificial Sequence: Synthetic oligonucleotide
gacacttgttccagacattt

SEQ ID NO: 23883 - DNA, 20 bp, synthetic construct
  source 1..20: mol_type = other DNA; note = Description of Artificial Sequence: Synthetic oligonucleotide
tgacacttgttccagacatt

SEQ ID NO: 23884 - DNA, 20 bp, synthetic construct
  source 1..20: mol_type = other DNA; note = Description of Artificial Sequence: Synthetic oligonucleotide
gtgacacttgttccagacat

SEQ ID NO: 23885 - DNA, 20 bp, synthetic construct
  source 1..20: mol_type = other DNA; note = Description of Artificial Sequence: Synthetic oligonucleotide
tgtgacacttgttccagaca

SEQ ID NO: 23886 - DNA, 20 bp, synthetic construct
  source 1..20: mol_type = other DNA; note = Description of Artificial Sequence: Synthetic oligonucleotide
ttgtgacacttgttccagac

SEQ ID NO: 23887 - DNA, 20 bp, synthetic construct
  source 1..20: mol_type = other DNA; note = Description of Artificial Sequence: Synthetic oligonucleotide
attgtgacacttgttccaga

SEQ ID NO: 23888 - DNA, 20 bp, synthetic construct
  source 1..20: mol_type = other DNA; note = Description of Artificial Sequence: Synthetic oligonucleotide
aattgtgacacttgttccag

SEQ ID NO: 23889 - DNA, 20 bp, synthetic construct
  source 1..20: mol_type = other DNA; note = Description of Artificial Sequence: Synthetic oligonucleotide
taattgtgacacttgttcca

SEQ ID NO: 23890 - DNA, 20 bp, synthetic construct
  source 1..20: mol_type = other DNA; note = Description of Artificial Sequence: Synthetic oligonucleotide
gtaattgtgacacttgttcc

SEQ ID NO: 23891 - DNA, 20 bp, synthetic construct
  source 1..20: mol_type = other DNA; note = Description of Artificial Sequence: Synthetic oligonucleotide
tgtaattgtgacacttgttc

SEQ ID NO: 23892 - DNA, 20 bp, synthetic construct
  source 1..20: mol_type = other DNA; note = Description of Artificial Sequence: Synthetic oligonucleotide
ttgtaattgtgacacttgtt

SEQ ID NO: 23893 - DNA, 20 bp, synthetic construct
  source 1..20: mol_type = other DNA; note = Description of Artificial Sequence: Synthetic oligonucleotide
cttgtaattgtgacacttgt

SEQ ID NO: 23894 - DNA, 20 bp, synthetic construct
  source 1..20: mol_type = other DNA; note = Description of Artificial Sequence: Synthetic oligonucleotide
ccttgtaattgtgacacttg

SEQ ID NO: 23895 - DNA, 20 bp, synthetic construct
  source 1..20: mol_type = other DNA; note = Description of Artificial Sequence: Synthetic oligonucleotide
tccttgtaattgtgacactt

SEQ ID NO: 23896 - DNA, 20 bp, synthetic construct
  source 1..20: mol_type = other DNA; note = Description of Artificial Sequence: Synthetic oligonucleotide
atccttgtaattgtgacact

SEQ ID NO: 23897 - DNA, 20 bp, synthetic construct
  source 1..20: mol_type = other DNA; note = Description of Artificial Sequence: Synthetic oligonucleotide
aatccttgtaattgtgacac

SEQ ID NO: 23898 - DNA, 20 bp, synthetic construct
  source 1..20: mol_type = other DNA; note = Description of Artificial Sequence: Synthetic oligonucleotide
caatccttgtaattgtgaca

SEQ ID NO: 23899 - DNA, 20 bp, synthetic construct
  source 1..20: mol_type = other DNA; note = Description of Artificial Sequence: Synthetic oligonucleotide
acaatccttgtaattgtgac

SEQ ID NO: 23900 - DNA, 20 bp, synthetic construct
  source 1..20: mol_type = other DNA; note = Description of Artificial Sequence: Synthetic oligonucleotide
cacaatccttgtaattgtga

SEQ ID NO: 23901 - DNA, 20 bp, synthetic construct
  source 1..20: mol_type = other DNA; note = Description of Artificial Sequence: Synthetic oligonucleotide
ccacaatccttgtaattgtg

SEQ ID NO: 23902 - DNA, 20 bp, synthetic construct
  source 1..20: mol_type = other DNA; note = Description of Artificial Sequence: Synthetic oligonucleotide
gccacaatccttgtaattgt

SEQ ID NO: 23903 - DNA, 20 bp, synthetic construct
  source 1..20: mol_type = other DNA; note = Description of Artificial Sequence: Synthetic oligonucleotide
cgccacaatccttgtaattg

SEQ ID NO: 23904 - DNA, 20 bp, synthetic construct
  source 1..20: mol_type = other DNA; note = Description of Artificial Sequence: Synthetic oligonucleotide
acgccacaatccttgtaatt

SEQ ID NO: 23905 - DNA, 20 bp, synthetic construct
  source 1..20: mol_type = other DNA; note = Description of Artificial Sequence: Synthetic oligonucleotide
gacgccacaatccttgtaat

SEQ ID NO: 23906 - DNA, 20 bp, synthetic construct
  source 1..20: mol_type = other DNA; note = Description of Artificial Sequence: Synthetic oligonucleotide
cgacgccacaatccttgtaa

SEQ ID NO: 23907 - DNA, 20 bp, synthetic construct
  source 1..20: mol_type = other DNA; note = Description of Artificial Sequence: Synthetic oligonucleotide
gcgacgccacaatccttgta

SEQ ID NO: 23908 - DNA, 20 bp, synthetic construct
  source 1..20: mol_type = other DNA; note = Description of Artificial Sequence: Synthetic oligonucleotide
agcgacgccacaatccttgt

SEQ ID NO: 23909 - DNA, 20 bp, synthetic construct
  source 1..20: mol_type = other DNA; note = Description of Artificial Sequence: Synthetic oligonucleotide
aagcgacgccacaatccttg

SEQ ID NO: 23910 - DNA, 20 bp, synthetic construct
  source 1..20: mol_type = other DNA; note = Description of Artificial Sequence: Synthetic oligonucleotide
gaagcgacgccacaatcctt

SEQ ID NO: 23911 - DNA, 20 bp, synthetic construct
  source 1..20: mol_type = other DNA; note = Description of Artificial Sequence: Synthetic oligonucleotide
tgaagcgacgccacaatcct

SEQ ID NO: 23912 - DNA, 20 bp, synthetic construct
  source 1..20: mol_type = other DNA; note = Description of Artificial Sequence: Synthetic oligonucleotide
ttgaagcgacgccacaatcc

SEQ ID NO: 23913 - DNA, 20 bp, synthetic construct
  source 1..20: mol_type = other DNA; note = Description of Artificial Sequence: Synthetic oligonucleotide
attgaagcgacgccacaatc

SEQ ID NO: 23914 - DNA, 20 bp, synthetic construct
  source 1..20: mol_type = other DNA; note = Description of Artificial Sequence: Synthetic oligonucleotide
gattgaagcgacgccacaat

SEQ ID NO: 23915 - DNA, 20 bp, synthetic construct
  source 1..20: mol_type = other DNA; note = Description of Artificial Sequence: Synthetic oligonucleotide
cgattgaagcgacgccacaa

SEQ ID NO: 23916 - DNA, 20 bp, synthetic construct
  source 1..20: mol_type = other DNA; note = Description of Artificial Sequence: Synthetic oligonucleotide
tcgattgaagcgacgccaca

SEQ ID NO: 23917 - DNA, 20 bp, synthetic construct
  source 1..20: mol_type = other DNA; note = Description of Artificial Sequence: Synthetic oligonucleotide
gtcgattgaagcgacgccac

SEQ ID NO: 23918 - DNA, 20 bp, synthetic construct
  source 1..20: mol_type = other DNA; note = Description of Artificial Sequence: Synthetic oligonucleotide
ggtcgattgaagcgacgcca

SEQ ID NO: 23919 - DNA, 20 bp, synthetic construct
  source 1..20: mol_type = other DNA; note = Description of Artificial Sequence: Synthetic oligonucleotide
aggtcgattgaagcgacgcc

SEQ ID NO: 23920 - DNA, 20 bp, synthetic construct
  source 1..20: mol_type = other DNA; note = Description of Artificial Sequence: Synthetic oligonucleotide
aaggtcgattgaagcgacgc

SEQ ID NO: 23921 - DNA, 20 bp, synthetic construct
  source 1..20: mol_type = other DNA; note = Description of Artificial Sequence: Synthetic oligonucleotide
aaaggtcgattgaagcgacg

SEQ ID NO: 23922 - DNA, 20 bp, synthetic construct
  source 1..20: mol_type = other DNA; note = Description of Artificial Sequence: Synthetic oligonucleotide
taaaggtcgattgaagcgac

SEQ ID NO: 23923 - DNA, 20 bp, synthetic construct
  source 1..20: mol_type = other DNA; note = Description of Artificial Sequence: Synthetic oligonucleotide
gtaaaggtcgattgaagcga

SEQ ID NO: 23924 - DNA, 20 bp, synthetic construct
  source 1..20: mol_type = other DNA; note = Description of Artificial Sequence: Synthetic oligonucleotide
agtaaaggtcgattgaagcg

SEQ ID NO: 23925 - DNA, 20 bp, synthetic construct
  source 1..20: mol_type = other DNA; note = Description of Artificial Sequence: Synthetic oligonucleotide
cagtaaaggtcgattgaagc

SEQ ID NO: 23926 - DNA, 20 bp, synthetic construct
  source 1..20: mol_type = other DNA; note = Description of Artificial Sequence: Synthetic oligonucleotide
tcagtaaaggtcgattgaag

SEQ ID NO: 23927 - DNA, 20 bp, synthetic construct
  source 1..20: mol_type = other DNA; note = Description of Artificial Sequence: Synthetic oligonucleotide
ttcagtaaaggtcgattgaa

SEQ ID NO: 23928 - DNA, 20 bp, synthetic construct
  source 1..20: mol_type = other DNA; note = Description of Artificial Sequence: Synthetic oligonucleotide
tttcagtaaaggtcgattga

SEQ ID NO: 23929 - DNA, 20 bp, synthetic construct
  source 1..20: mol_type = other DNA; note = Description of Artificial Sequence: Synthetic oligonucleotide
gtttcagtaaaggtcgattg

SEQ ID NO: 23930 - DNA, 20 bp, synthetic construct
  source 1..20: mol_type = other DNA; note = Description of Artificial Sequence: Synthetic oligonucleotide
tgtttcagtaaaggtcgatt

SEQ ID NO: 23931 - DNA, 20 bp, synthetic construct
  source 1..20: mol_type = other DNA; note = Description of Artificial Sequence: Synthetic oligonucleotide
ttgtttcagtaaaggtcgat

SEQ ID NO: 23932 - DNA, 20 bp, synthetic construct
  source 1..20: mol_type = other DNA; note = Description of Artificial Sequence: Synthetic oligonucleotide
gttgtttcagtaaaggtcga

SEQ ID NO: 23933 - DNA, 20 bp, synthetic construct
  source 1..20: mol_type = other DNA; note = Description of Artificial Sequence: Synthetic oligonucleotide
tgttgtttcagtaaaggtcg

SEQ ID NO: 23934 - DNA, 20 bp, synthetic construct
  source 1..20: mol_type = other DNA; note = Description of Artificial Sequence: Synthetic oligonucleotide
ctgttgtttcagtaaaggtc

SEQ ID NO: 23935 - DNA, 20 bp, synthetic construct
  source 1..20: mol_type = other DNA; note = Description of Artificial Sequence: Synthetic oligonucleotide
actgttgtttcagtaaaggt

SEQ ID NO: 23936 - DNA, 20 bp, synthetic construct
  source 1..20: mol_type = other DNA; note = Description of Artificial Sequence: Synthetic oligonucleotide
tactgttgtttcagtaaagg

SEQ ID NO: 23937 - DNA, 20 bp, synthetic construct
  source 1..20: mol_type = other DNA; note = Description of Artificial Sequence: Synthetic oligonucleotide
ttactgttgtttcagtaaag

SEQ ID NO: 23938 - DNA, 20 bp, synthetic construct
  source 1..20: mol_type = other DNA; note = Description of Artificial Sequence: Synthetic oligonucleotide
tttactgttgtttcagtaaa

SEQ ID NO: 23939 - DNA, 20 bp, synthetic construct
  source 1..20: mol_type = other DNA; note = Description of Artificial Sequence: Synthetic oligonucleotide
gtttactgttgtttcagtaa

SEQ ID NO: 23940 - DNA, 20 bp, synthetic construct
  source 1..20: mol_type = other DNA; note = Description of Artificial Sequence: Synthetic oligonucleotide
ggtttactgttgtttcagta

SEQ ID NO: 23941 - DNA, 20 bp, synthetic construct
  source 1..20: mol_type = other DNA; note = Description of Artificial Sequence: Synthetic oligonucleotide
tggtttactgttgtttcagt

SEQ ID NO: 23942 - DNA, 20 bp, synthetic construct
  source 1..20: mol_type = other DNA; note = Description of Artificial Sequence: Synthetic oligonucleotide
atggtttactgttgtttcag

SEQ ID NO: 23943 - DNA, 20 bp, synthetic construct
  source 1..20: mol_type = other DNA; note = Description of Artificial Sequence: Synthetic oligonucleotide
gatggtttactgttgtttca

SEQ ID NO: 23944 - DNA, 20 bp, synthetic construct
  source 1..20: mol_type = other DNA; note = Description of Artificial Sequence: Synthetic oligonucleotide
agatggtttactgttgtttc

SEQ ID NO: 23945 - DNA, 20 bp, synthetic construct
  source 1..20: mol_type = other DNA; note = Description of Artificial Sequence: Synthetic oligonucleotide
aagatggtttactgttgttt

SEQ ID NO: 23946 - DNA, 20 bp, synthetic construct
  source 1..20: mol_type = other DNA; note = Description of Artificial Sequence: Synthetic oligonucleotide
aaagatggtttactgttgtt

SEQ ID NO: 23947 - DNA, 20 bp, synthetic construct
  source 1..20: mol_type = other DNA; note = Description of Artificial Sequence: Synthetic oligonucleotide
taaagatggtttactgttgt

SEQ ID NO: 23948 - DNA, 20 bp, synthetic construct
  source 1..20: mol_type = other DNA; note = Description of Artificial Sequence: Synthetic oligonucleotide
ataaagatggtttactgttg

SEQ ID NO: 23949 - DNA, 20 bp, synthetic construct
  source 1..20: mol_type = other DNA; note = Description of Artificial Sequence: Synthetic oligonucleotide
aataaagatggtttactgtt

SEQ ID NO: 23950 - DNA, 20 bp, synthetic construct
  source 1..20: mol_type = other DNA; note = Description of Artificial Sequence: Synthetic oligonucleotide
taataaagatggtttactgt

SEQ ID NO: 23951 - DNA, 20 bp, synthetic construct
  source 1..20: mol_type = other DNA; note = Description of Artificial Sequence: Synthetic oligonucleotide
ataataaagatggtttactg

SEQ ID NO: 23952 - DNA, 20 bp, synthetic construct
  source 1..20: mol_type = other DNA; note = Description of Artificial Sequence: Synthetic oligonucleotide
cataataaagatggtttact

SEQ ID NO: 23953 - DNA, 20 bp, synthetic construct
  source 1..20: mol_type = other DNA; note = Description of Artificial Sequence: Synthetic oligonucleotide
ccataataaagatggtttac

SEQ ID NO: 23954 - DNA, 20 bp, synthetic construct
  source 1..20: mol_type = other DNA; note = Description of Artificial Sequence: Synthetic oligonucleotide
accataataaagatggttta

SEQ ID NO: 23955 - DNA, 20 bp, synthetic construct
  source 1..20: mol_type = other DNA; note = Description of Artificial Sequence: Synthetic oligonucleotide
gaccataataaagatggttt

SEQ ID NO: 23956 - DNA, 20 bp, synthetic construct
  source 1..20: mol_type = other DNA; note = Description of Artificial Sequence: Synthetic oligonucleotide
tgaccataataaagatggtt

SEQ ID NO: 23957 - DNA, 20 bp, synthetic construct
  source 1..20: mol_type = other DNA; note = Description of Artificial Sequence: Synthetic oligonucleotide
atgaccataataaagatggt

SEQ ID NO: 23958 - DNA, 20 bp, synthetic construct
  source 1..20: mol_type = other DNA; note = Description of Artificial Sequence: Synthetic oligonucleotide
tatgaccataataaagatgg

SEQ ID NO: 23959 - DNA, 20 bp, synthetic construct
  source 1..20: mol_type = other DNA; note = Description of Artificial Sequence: Synthetic oligonucleotide
atatgaccataataaagatg

SEQ ID NO: 23960 - DNA, 20 bp, synthetic construct
  source 1..20: mol_type = other DNA; note = Description of Artificial Sequence: Synthetic oligonucleotide
aatatgaccataataaagat

SEQ ID NO: 23961 - DNA, 20 bp, synthetic construct
  source 1..20: mol_type = other DNA; note = Description of Artificial Sequence: Synthetic oligonucleotide
aaatatgaccataataaaga

SEQ ID NO: 23962 - DNA, 20 bp, synthetic construct
  source 1..20: mol_type = other DNA; note = Description of Artificial Sequence: Synthetic oligonucleotide
gaaatatgaccataataaag

SEQ ID NO: 23963 - DNA, 20 bp, synthetic construct
  source 1..20: mol_type = other DNA; note = Description of Artificial Sequence: Synthetic oligonucleotide
tgaaatatgaccataataaa

SEQ ID NO: 23964 - DNA, 20 bp, synthetic construct
  source 1..20: mol_type = other DNA; note = Description of Artificial Sequence: Synthetic oligonucleotide
gtgaaatatgaccataataa

SEQ ID NO: 23965 - DNA, 20 bp, synthetic construct
  source 1..20: mol_type = other DNA; note = Description of Artificial Sequence: Synthetic oligonucleotide
tgtgaaatatgaccataata

SEQ ID NO: 23966 - DNA, 20 bp, synthetic construct
  source 1..20: mol_type = other DNA; note = Description of Artificial Sequence: Synthetic oligonucleotide
ctgtgaaatatgaccataat

SEQ ID NO: 23967 - DNA, 20 bp, synthetic construct
  source 1..20: mol_type = other DNA; note = Description of Artificial Sequence: Synthetic oligonucleotide
gctgtgaaatatgaccataa

SEQ ID NO: 23968 - DNA, 20 bp, synthetic construct
  source 1..20: mol_type = other DNA; note = Description of Artificial Sequence: Synthetic oligonucleotide
tgctgtgaaatatgaccata

SEQ ID NO: 23969 - DNA, 20 bp, synthetic construct
  source 1..20: mol_type = other DNA; note = Description of Artificial Sequence: Synthetic oligonucleotide
gtgctgtgaaatatgaccat

SEQ ID NO: 23970 - DNA, 20 bp, synthetic construct
  source 1..20: mol_type = other DNA; note = Description of Artificial Sequence: Synthetic oligonucleotide
ggtgctgtgaaatatgacca

SEQ ID NO: 23971 - DNA, 20 bp, synthetic construct
  source 1..20: mol_type = other DNA; note = Description of Artificial Sequence: Synthetic oligonucleotide
tggtgctgtgaaatatgacc

SEQ ID NO: 23972 - DNA, 20 bp, synthetic construct
  source 1..20: mol_type = other DNA; note = Description of Artificial Sequence: Synthetic oligonucleotide
ttggtgctgtgaaatatgac

SEQ ID NO: 23973 - DNA, 20 bp, synthetic construct
  source 1..20: mol_type = other DNA; note = Description of Artificial Sequence: Synthetic oligonucleotide
tttggtgctgtgaaatatga

SEQ ID NO: 23974 - DNA, 20 bp, synthetic construct
  source 1..20: mol_type = other DNA; note = Description of Artificial Sequence: Synthetic oligonucleotide
ttttggtgctgtgaaatatg

SEQ ID NO: 23975 - DNA, 20 bp, synthetic construct
  source 1..20: mol_type = other DNA; note = Description of Artificial Sequence: Synthetic oligonucleotide
attttggtgctgtgaaatat

SEQ ID NO: 23976 - DNA, 20 bp, synthetic construct
  source 1..20: mol_type = other DNA; note = Description of Artificial Sequence: Synthetic oligonucleotide
tattttggtgctgtgaaata

SEQ ID NO: 23977 - DNA, 20 bp, synthetic construct
  source 1..20: mol_type = other DNA; note = Description of Artificial Sequence: Synthetic oligonucleotide
ttattttggtgctgtgaaat

SEQ ID NO: 23978 - DNA, 20 bp, synthetic construct
  source 1..20: mol_type = other DNA; note = Description of Artificial Sequence: Synthetic oligonucleotide
tttattttggtgctgtgaaa

SEQ ID NO: 23979 - DNA, 20 bp, synthetic construct
  source 1..20: mol_type = other DNA; note = Description of Artificial Sequence: Synthetic oligonucleotide
atttattttggtgctgtgaa

SEQ ID NO: 23980 - DNA, 20 bp, synthetic construct
  source 1..20: mol_type = other DNA; note = Description of Artificial Sequence: Synthetic oligonucleotide
gatttattttggtgctgtga

SEQ ID NO: 23981 - DNA, 20 bp, synthetic construct
  source 1..20: mol_type = other DNA; note = Description of Artificial Sequence: Synthetic oligonucleotide
tgatttattttggtgctgtg

SEQ ID NO: 23982 - DNA, 20 bp, synthetic construct
  source 1..20: mol_type = other DNA; note = Description of Artificial Sequence: Synthetic oligonucleotide
atgatttattttggtgctgt

SEQ ID NO: 23983 - DNA, 20 bp, synthetic construct
  source 1..20: mol_type = other DNA; note = Description of Artificial Sequence: Synthetic oligonucleotide
gatgatttattttggtgctg

SEQ ID NO: 23984 - DNA, 20 bp, synthetic construct
  source 1..20: mol_type = other DNA; note = Description of Artificial Sequence: Synthetic oligonucleotide
agatgatttattttggtgct

SEQ ID NO: 23985 - DNA, 20 bp, synthetic construct
  source 1..20: mol_type = other DNA; note = Description of Artificial Sequence: Synthetic oligonucleotide
aagatgatttattttggtgc

SEQ ID NO: 23986 - DNA, 20 bp, synthetic construct
  source 1..20: mol_type = other DNA; note = Description of Artificial Sequence: Synthetic oligonucleotide
aaagatgatttattttggtg

SEQ ID NO: 23987 - DNA, 20 bp, synthetic construct
  source 1..20: mol_type = other DNA; note = Description of Artificial Sequence: Synthetic oligonucleotide
taaagatgatttattttggt

SEQ ID NO: 23988 - DNA, 20 bp, synthetic construct
  source 1..20: mol_type = other DNA; note = Description of Artificial Sequence: Synthetic oligonucleotide
ataaagatgatttattttgg

SEQ ID NO: 23989 - DNA, 20 bp, synthetic construct
  source 1..20: mol_type = other DNA; note = Description of Artificial Sequence: Synthetic oligonucleotide
aataaagatgatttattttg

SEQ ID NO: 23990 - DNA, 20 bp, synthetic construct
  source 1..20: mol_type = other DNA; note = Description of Artificial Sequence: Synthetic oligonucleotide
taataaagatgatttatttt

SEQ ID NO: 23991 - DNA, 20 bp, synthetic construct
  source 1..20: mol_type = other DNA; note = Description of Artificial Sequence: Synthetic oligonucleotide
ttaataaagatgatttattt

SEQ ID NO: 23992 - DNA, 20 bp, synthetic construct
  source 1..20: mol_type = other DNA; note = Description of Artificial Sequence: Synthetic oligonucleotide
cttaataaagatgatttatt

SEQ ID NO: 23993 - DNA, 20 bp, synthetic construct
  source 1..20: mol_type = other DNA; note = Description of Artificial Sequence: Synthetic oligonucleotide
acttaataaagatgatttat

SEQ ID NO: 23994 - DNA, 20 bp, synthetic construct
  source 1..20: mol_type = other DNA; note = Description of Artificial Sequence: Synthetic oligonucleotide
tacttaataaagatgattta

SEQ ID NO: 23995 - DNA, 20 bp, synthetic construct
  source 1..20: mol_type = other DNA; note = Description of Artificial Sequence: Synthetic oligonucleotide
ctacttaataaagatgattt

SEQ ID NO: 23996 - DNA, 20 bp, synthetic construct
  source 1..20: mol_type = other DNA; note = Description of Artificial Sequence: Synthetic oligonucleotide
tctacttaataaagatgatt

SEQ ID NO: 23997 - DNA, 20 bp, synthetic construct
  source 1..20: mol_type = other DNA; note = Description of Artificial Sequence: Synthetic oligonucleotide
atctacttaataaagatgat

SEQ ID NO: 23998 - DNA, 20 bp, synthetic construct
  source 1..20: mol_type = other DNA; note = Description of Artificial Sequence: Synthetic oligonucleotide
catctacttaataaagatga

SEQ ID NO: 23999 - DNA, 20 bp, synthetic construct
  source 1..20: mol_type = other DNA; note = Description of Artificial Sequence: Synthetic oligonucleotide
tcatctacttaataaagatg

SEQ ID NO: 24000 - DNA, 20 bp, synthetic construct
  source 1..20: mol_type = other DNA; note = Description of Artificial Sequence: Synthetic oligonucleotide
ttcatctacttaataaagat

SEQ ID NO: 24001 - DNA, 20 bp, synthetic construct
  source 1..20: mol_type = other DNA; note = Description of Artificial Sequence: Synthetic oligonucleotide
tttcatctacttaataaaga

SEQ ID NO: 24002 - DNA, 20 bp, synthetic construct
  source 1..20: mol_type = other DNA; note = Description of Artificial Sequence: Synthetic oligonucleotide
gtttcatctacttaataaag

SEQ ID NO: 24003 - DNA, 20 bp, synthetic construct
  source 1..20: mol_type = other DNA; note = Description of Artificial Sequence: Synthetic oligonucleotide
tgtttcatctacttaataaa

SEQ ID NO: 24004 - DNA, 20 bp, synthetic construct
  source 1..20: mol_type = other DNA; note = Description of Artificial Sequence: Synthetic oligonucleotide
atgtttcatctacttaataa

SEQ ID NO: 24005 - DNA, 20 bp, synthetic construct
  source 1..20: mol_type = other DNA; note = Description of Artificial Sequence: Synthetic oligonucleotide
aatgtttcatctacttaata

SEQ ID NO: 24006 - DNA, 20 bp, synthetic construct
  source 1..20: mol_type = other DNA; note = Description of Artificial Sequence: Synthetic oligonucleotide
taatgtttcatctacttaat

SEQ ID NO: 24007 - DNA, 20 bp, synthetic construct
  source 1..20: mol_type = other DNA; note = Description of Artificial Sequence: Synthetic oligonucleotide
ttaatgtttcatctacttaa

SEQ ID NO: 24008 - DNA, 20 bp, synthetic construct
  source 1..20: mol_type = other DNA; note = Description of Artificial Sequence: Synthetic oligonucleotide
gttaatgtttcatctactta

SEQ ID NO: 24009 - DNA, 20 bp, synthetic construct
  source 1..20: mol_type = other DNA; note = Description of Artificial Sequence: Synthetic oligonucleotide
agttaatgtttcatctactt

SEQ ID NO: 24010 - DNA, 20 bp, synthetic construct
  source 1..20: mol_type = other DNA; note = Description of Artificial Sequence: Synthetic oligonucleotide
gagttaatgtttcatctact

SEQ ID NO: 24011 - DNA, 20 bp, synthetic construct
  source 1..20: mol_type = other DNA; note = Description of Artificial Sequence: Synthetic oligonucleotide
agagttaatgtttcatctac

SEQ ID NO: 24012 - DNA, 20 bp, synthetic construct
  source 1..20: mol_type = other DNA; note = Description of Artificial Sequence: Synthetic oligonucleotide
tagagttaatgtttcatcta

SEQ ID NO: 24013 - DNA, 20 bp, synthetic construct
  source 1..20: mol_type = other DNA; note = Description of Artificial Sequence: Synthetic oligonucleotide
ttagagttaatgtttcatct

SEQ ID NO: 24014 - DNA, 20 bp, synthetic construct
  source 1..20: mol_type = other DNA; note = Description of Artificial Sequence: Synthetic oligonucleotide
gttagagttaatgtttcatc

SEQ ID NO: 24015 - DNA, 20 bp, synthetic construct
  source 1..20: mol_type = other DNA; note = Description of Artificial Sequence: Synthetic oligonucleotide
agttagagttaatgtttcat

SEQ ID NO: 24016 - DNA, 20 bp, synthetic construct
  source 1..20: mol_type = other DNA; note = Description of Artificial Sequence: Synthetic oligonucleotide
cagttagagttaatgtttca

SEQ ID NO: 24017 - DNA, 20 bp, synthetic construct
  source 1..20: mol_type = other DNA; note = Description of Artificial Sequence: Synthetic oligonucleotide
acagttagagttaatgtttc

SEQ ID NO: 24018 - DNA, 20 bp, synthetic construct
  source 1..20: mol_type = other DNA; note = Description of Artificial Sequence: Synthetic oligonucleotide
cacagttagagttaatgttt

SEQ ID NO: 24019 - DNA, 20 bp, synthetic construct
  source 1..20: mol_type = other DNA; note = Description of Artificial Sequence: Synthetic oligonucleotide
tcacagttagagttaatgtt

SEQ ID NO: 24020 - DNA, 20 bp, synthetic construct
  source 1..20: mol_type = other DNA; note = Description of Artificial Sequence: Synthetic oligonucleotide
gtcacagttagagttaatgt

SEQ ID NO: 24021 - DNA, 20 bp, synthetic construct
  source 1..20: mol_type = other DNA; note = Description of Artificial Sequence: Synthetic oligonucleotide
tgtcacagttagagttaatg

SEQ ID NO: 24022 - DNA, 20 bp, synthetic construct
  source 1..20: mol_type = other DNA; note = Description of Artificial Sequence: Synthetic oligonucleotide
ttgtcacagttagagttaat

SEQ ID NO: 24023 - DNA, 20 bp, synthetic construct
  source 1..20: mol_type = other DNA; note = Description of Artificial Sequence: Synthetic oligonucleotide
tttgtcacagttagagttaa

SEQ ID NO: 24024 - DNA, 20 bp, synthetic construct
  source 1..20: mol_type = other DNA; note = Description of Artificial Sequence: Synthetic oligonucleotide
ctttgtcacagttagagtta

SEQ ID NO: 24025 - DNA, 20 bp, synthetic construct
  source 1..20: mol_type = other DNA; note = Description of Artificial Sequence: Synthetic oligonucleotide
tctttgtcacagttagagtt

SEQ ID NO: 24026 - DNA, 20 bp, synthetic construct
  source 1..20: mol_type = other DNA; note = Description of Artificial Sequence: Synthetic oligonucleotide
ttctttgtcacagttagagt

SEQ ID NO: 24027 - DNA, 20 bp, synthetic construct
  source 1..20: mol_type = other DNA; note = Description of Artificial Sequence: Synthetic oligonucleotide
cttctttgtcacagttagag

SEQ ID NO: 24028 - DNA, 20 bp, synthetic construct
  source 1..20: mol_type = other DNA; note = Description of Artificial Sequence: Synthetic oligonucleotide
tcttctttgtcacagttaga

SEQ ID NO: 24029 - DNA, 20 bp, synthetic construct
  source 1..20: mol_type = other DNA; note = Description of Artificial Sequence: Synthetic oligonucleotide
gtcttctttgtcacagttag

SEQ ID NO: 24030 - DNA, 20 bp, synthetic construct
  source 1..20: mol_type = other DNA; note = Description of Artificial Sequence: Synthetic oligonucleotide
ggtcttctttgtcacagtta

SEQ ID NO: 24031 - DNA, 20 bp, synthetic construct
  source 1..20: mol_type = other DNA; note = Description of Artificial Sequence: Synthetic oligonucleotide
tggtcttctttgtcacagtt

SEQ ID NO: 24032 - DNA, 20 bp, synthetic construct
  source 1..20: mol_type = other DNA; note = Description of Artificial Sequence: Synthetic oligonucleotide
gtggtcttctttgtcacagt

SEQ ID NO: 24033 - DNA, 20 bp, synthetic construct
  source 1..20: mol_type = other DNA; note = Description of Artificial Sequence: Synthetic oligonucleotide
tgtggtcttctttgtcacag

SEQ ID NO: 24034 - DNA, 20 bp, synthetic construct
  source 1..20: mol_type = other DNA; note = Description of Artificial Sequence: Synthetic oligonucleotide
ttgtggtcttctttgtcaca

SEQ ID NO: 24035 - DNA, 20 bp, synthetic construct
  source 1..20: mol_type = other DNA; note = Description of Artificial Sequence: Synthetic oligonucleotide
tttgtggtcttctttgtcac

SEQ ID NO: 24036 - DNA, 20 bp, synthetic construct
  source 1..20: mol_type = other DNA; note = Description of Artificial Sequence: Synthetic oligonucleotide
atttgtggtcttctttgtca

SEQ ID NO: 24037 - DNA, 20 bp, synthetic construct
  source 1..20: mol_type = other DNA; note = Description of Artificial Sequence: Synthetic oligonucleotide
tatttgtggtcttctttgtc

SEQ ID NO: 24038 - DNA, 20 bp, synthetic construct
  source 1..20: mol_type = other DNA; note = Description of Artificial Sequence: Synthetic oligonucleotide
ctatttgtggtcttctttgt

SEQ ID NO: 24039 - DNA, 20 bp, synthetic construct
  source 1..20: mol_type = other DNA; note = Description of Artificial Sequence: Synthetic oligonucleotide
actatttgtggtcttctttg

SEQ ID NO: 24040 - DNA, 20 bp, synthetic construct
  source 1..20: mol_type = other DNA; note = Description of Artificial Sequence: Synthetic oligonucleotide
aactatttgtggtcttcttt

SEQ ID NO: 24041 - DNA, 20 bp, synthetic construct
  source 1..20: mol_type = other DNA; note = Description of Artificial Sequence: Synthetic oligonucleotide
taactatttgtggtcttctt

SEQ ID NO: 24042 - DNA, 20 bp, synthetic construct
  source 1..20: mol_type = other DNA; note = Description of Artificial Sequence: Synthetic oligonucleotide
ataactatttgtggtcttct

SEQ ID NO: 24043 - DNA, 20 bp, synthetic construct
  source 1..20: mol_type = other DNA; note = Description of Artificial Sequence: Synthetic oligonucleotide
gataactatttgtggtcttc

SEQ ID NO: 24044 - DNA, 20 bp, synthetic construct
  source 1..20: mol_type = other DNA; note = Description of Artificial Sequence: Synthetic oligonucleotide
agataactatttgtggtctt

SEQ ID NO: 24045 - DNA, 20 bp, synthetic construct
  source 1..20: mol_type = other DNA; note = Description of Artificial Sequence: Synthetic oligonucleotide
aagataactatttgtggtct

SEQ ID NO: 24046 - DNA, 20 bp, synthetic construct
  source 1..20: mol_type = other DNA; note = Description of Artificial Sequence: Synthetic oligonucleotide
aaagataactatttgtggtc

SEQ ID NO: 24047 - DNA, 20 bp, synthetic construct
  source 1..20: mol_type = other DNA; note = Description of Artificial Sequence: Synthetic oligonucleotide
aaaagataactatttgtggt

SEQ ID NO: 24048 - DNA, 20 bp, synthetic construct
  source 1..20: mol_type = other DNA; note = Description of Artificial Sequence: Synthetic oligonucleotide
taaaagataactatttgtgg

SEQ ID NO: 24049 - DNA, 20 bp, synthetic construct
  source 1..20: mol_type = other DNA; note = Description of Artificial Sequence: Synthetic oligonucleotide
ttaaaagataactatttgtg

SEQ ID NO: 24050 - DNA, 20 bp, synthetic construct
  source 1..20: mol_type = other DNA; note = Description of Artificial Sequence: Synthetic oligonucleotide
attaaaagataactatttgt

SEQ ID NO: 24051 - DNA, 20 bp, synthetic construct
  source 1..20: mol_type = other DNA; note = Description of Artificial Sequence: Synthetic oligonucleotide
aattaaaagataactatttg

SEQ ID NO: 24052 - DNA, 20 bp, synthetic construct
  source 1..20: mol_type = other DNA; note = Description of Artificial Sequence: Synthetic oligonucleotide
taattaaaagataactattt

SEQ ID NO: 24053 - DNA, 20 bp, synthetic construct
  source 1..20: mol_type = other DNA; note = Description of Artificial Sequence: Synthetic oligonucleotide
gtaattaaaagataactatt

SEQ ID NO: 24054 - DNA, 20 bp, synthetic construct
  source 1..20: mol_type = other DNA; note = Description of Artificial Sequence: Synthetic oligonucleotide
tgtaattaaaagataactat

SEQ ID NO: 24055 - DNA, 20 bp, synthetic construct
  source 1..20: mol_type = other DNA; note = Description of Artificial Sequence: Synthetic oligonucleotide
ctgtaattaaaagataacta

SEQ ID NO: 24056 - DNA, 20 bp, synthetic construct
  source 1..20: mol_type = other DNA; note = Description of Artificial Sequence: Synthetic oligonucleotide
tctgtaattaaaagataact

SEQ ID NO: 24057 - DNA, 20 bp, synthetic construct
  source 1..20: mol_type = other DNA; note = Description of Artificial Sequence: Synthetic oligonucleotide
ttctgtaattaaaagataac

SEQ ID NO: 24058 - DNA, 20 bp, synthetic construct
  source 1..20: mol_type = other DNA; note = Description of Artificial Sequence: Synthetic oligonucleotide
cttctgtaattaaaagataa

SEQ ID NO: 24059 - DNA, 20 bp, synthetic construct
  source 1..20: mol_type = other DNA; note = Description of Artificial Sequence: Synthetic oligonucleotide
tcttctgtaattaaaagata

SEQ ID NO: 24060 - DNA, 20 bp, synthetic construct
  source 1..20: mol_type = other DNA; note = Description of Artificial Sequence: Synthetic oligonucleotide
ctcttctgtaattaaaagat

SEQ ID NO: 24061 - DNA, 20 bp, synthetic construct
  source 1..20: mol_type = other DNA; note = Description of Artificial Sequence: Synthetic oligonucleotide
actcttctgtaattaaaaga

SEQ ID NO: 24062 - DNA, 20 bp, synthetic construct
  source 1..20: mol_type = other DNA; note = Description of Artificial Sequence: Synthetic oligonucleotide
aactcttctgtaattaaaag

SEQ ID NO: 24063 - DNA, 20 bp, synthetic construct
  source 1..20: mol_type = other DNA; note = Description of Artificial Sequence: Synthetic oligonucleotide
aaactcttctgtaattaaaa

SEQ ID NO: 24064 - DNA, 20 bp, synthetic construct
  source 1..20: mol_type = other DNA; note = Description of Artificial Sequence: Synthetic oligonucleotide
gaaactcttctgtaattaaa

SEQ ID NO: 24065 - DNA, 20 bp, synthetic construct
  source 1..20: mol_type = other DNA; note = Description of Artificial Sequence: Synthetic oligonucleotide
agaaactcttctgtaattaa

SEQ ID NO: 24066 - DNA, 20 bp, synthetic construct
  source 1..20: mol_type = other DNA; note = Description of Artificial Sequence: Synthetic oligonucleotide
aagaaactcttctgtaatta

SEQ ID NO: 24067 - DNA, 20 bp, synthetic construct
  source 1..20: mol_type = other DNA; note = Description of Artificial Sequence: Synthetic oligonucleotide
taagaaactcttctgtaatt

SEQ ID NO: 24068 - DNA, 20 bp, synthetic construct
  source 1..20: mol_type = other DNA; note = Description of Artificial Sequence: Synthetic oligonucleotide
ttaagaaactcttctgtaat

SEQ ID NO: 24069 - DNA, 20 bp, synthetic construct
  source 1..20: mol_type = other DNA; note = Description of Artificial Sequence: Synthetic oligonucleotide
gttaagaaactcttctgtaa

SEQ ID NO: 24070 - DNA, 20 bp, synthetic construct
  source 1..20: mol_type = other DNA; note = Description of Artificial Sequence: Synthetic oligonucleotide
agttaagaaactcttctgta

SEQ ID NO: 24071 - DNA, 20 bp, synthetic construct
  source 1..20: mol_type = other DNA; note = Description of Artificial Sequence: Synthetic oligonucleotide
aagttaagaaactcttctgt

SEQ ID NO: 24072 - DNA, 20 bp, synthetic construct
  source 1..20: mol_type = other DNA; note = Description of Artificial Sequence: Synthetic oligonucleotide
taagttaagaaactcttctg

SEQ ID NO: 24073 - DNA, 20 bp, synthetic construct
  source 1..20: mol_type = other DNA; note = Description of Artificial Sequence: Synthetic oligonucleotide
gtaagttaagaaactcttct

SEQ ID NO: 24074 - DNA, 20 bp, synthetic construct
  source 1..20: mol_type = other DNA; note = Description of Artificial Sequence: Synthetic oligonucleotide
agtaagttaagaaactcttc

SEQ ID NO: 24075 - DNA, 20 bp, synthetic construct
  source 1..20: mol_type = other DNA; note = Description of Artificial Sequence: Synthetic oligonucleotide
aagtaagttaagaaactctt

SEQ ID NO: 24076 - DNA, 20 bp, synthetic construct
  source 1..20: mol_type = other DNA; note = Description of Artificial Sequence: Synthetic oligonucleotide
aaagtaagttaagaaactct

SEQ ID NO: 24077 - DNA, 20 bp, synthetic construct
  source 1..20: mol_type = other DNA; note = Description of Artificial Sequence: Synthetic oligonucleotide
aaaagtaagttaagaaactc

SEQ ID NO: 24078 - DNA, 20 bp, synthetic construct
  source 1..20: mol_type = other DNA; note = Description of Artificial Sequence: Synthetic oligonucleotide
caaaagtaagttaagaaact

SEQ ID NO: 24079 - DNA, 20 bp, synthetic construct
  source 1..20: mol_type = other DNA; note = Description of Artificial Sequence: Synthetic oligonucleotide
acaaaagtaagttaagaaac

SEQ ID NO: 24080 - DNA, 20 bp, synthetic construct
  source 1..20: mol_type = other DNA; note = Description of Artificial Sequence: Synthetic oligonucleotide
tacaaaagtaagttaagaaa

SEQ ID NO: 24081 - DNA, 20 bp, synthetic construct
  source 1..20: mol_type = other DNA; note = Description of Artificial Sequence: Synthetic oligonucleotide
ttacaaaagtaagttaagaa

SEQ ID NO: 24082 - DNA, 20 bp, synthetic construct
  source 1..20: mol_type = other DNA; note = Description of Artificial Sequence: Synthetic oligonucleotide
cttacaaaagtaagttaaga

SEQ ID NO: 24083 - DNA, 20 bp, synthetic construct
  source 1..20: mol_type = other DNA; note = Description of Artificial Sequence: Synthetic oligonucleotide
acttacaaaagtaagttaag

SEQ ID NO: 24084 - DNA, 20 bp, synthetic construct
  source 1..20: mol_type = other DNA; note = Description of Artificial Sequence: Synthetic oligonucleotide
aacttacaaaagtaagttaa

SEQ ID NO: 24085 - DNA, 20 bp, synthetic construct
  source 1..20: mol_type = other DNA; note = Description of Artificial Sequence: Synthetic oligonucleotide
aaacttacaaaagtaagtta

SEQ ID NO: 24086 - DNA, 20 bp, synthetic construct
  source 1..20: mol_type = other DNA; note = Description of Artificial Sequence: Synthetic oligonucleotide
aaaacttacaaaagtaagtt

SEQ ID NO: 24087 - DNA, 20 bp, synthetic construct
  source 1..20: mol_type = other DNA; note = Description of Artificial Sequence: Synthetic oligonucleotide
aaaaacttacaaaagtaagt

SEQ ID NO: 24088 - DNA, 20 bp, synthetic construct
  source 1..20: mol_type = other DNA; note = Description of Artificial Sequence: Synthetic oligonucleotide
taaaaacttacaaaagtaag

SEQ ID NO: 24089 - DNA, 20 bp, synthetic construct
  source 1..20: mol_type = other DNA; note = Description of Artificial Sequence: Synthetic oligonucleotide
ataaaaacttacaaaagtaa

SEQ ID NO: 24090 - DNA, 20 bp, synthetic construct
  source 1..20: mol_type = other DNA; note = Description of Artificial Sequence: Synthetic oligonucleotide
aataaaaacttacaaaagta

SEQ ID NO: 24091 - DNA, 20 bp, synthetic construct
  source 1..20: mol_type = other DNA; note = Description of Artificial Sequence: Synthetic oligonucleotide
caataaaaacttacaaaagt

SEQ ID NO: 24092 - DNA, 20 bp, synthetic construct
  source 1..20: mol_type = other DNA; note = Description of Artificial Sequence: Synthetic oligonucleotide
acaataaaaacttacaaaag

SEQ ID NO: 24093 - DNA, 20 bp, synthetic construct
  source 1..20: mol_type = other DNA; note = Description of Artificial Sequence: Synthetic oligonucleotide
cacaataaaaacttacaaaa

SEQ ID NO: 24094 - DNA, 20 bp, synthetic construct
  source 1..20: mol_type = other DNA; note = Description of Artificial Sequence: Synthetic oligonucleotide
acacaataaaaacttacaaa

SEQ ID NO: 24095 - DNA, 20 bp, synthetic construct
  source 1..20: mol_type = other DNA; note = Description of Artificial Sequence: Synthetic oligonucleotide
tacacaataaaaacttacaa

SEQ ID NO: 24096 - DNA, 20 bp, synthetic construct
  source 1..20: mol_type = other DNA; note = Description of Artificial Sequence: Synthetic oligonucleotide
ttacacaataaaaacttaca

SEQ ID NO: 24097 - DNA, 20 bp, synthetic construct
  source 1..20: mol_type = other DNA; note = Description of Artificial Sequence: Synthetic oligonucleotide
cttacacaataaaaacttac

SEQ ID NO: 24098 - DNA, 20 bp, synthetic construct
  source 1..20: mol_type = other DNA; note = Description of Artificial Sequence: Synthetic oligonucleotide
acttacacaataaaaactta

SEQ ID NO: 24099 - DNA, 20 bp, synthetic construct
  source 1..20: mol_type = other DNA; note = Description of Artificial Sequence: Synthetic oligonucleotide
aacttacacaataaaaactt

SEQ ID NO: 24100 - DNA, 20 bp, synthetic construct
  source 1..20: mol_type = other DNA; note = Description of Artificial Sequence: Synthetic oligonucleotide
aaacttacacaataaaaact

SEQ ID NO: 24101 - DNA, 20 bp, synthetic construct
  source 1..20: mol_type = other DNA; note = Description of Artificial Sequence: Synthetic oligonucleotide
taaacttacacaataaaaac

SEQ ID NO: 24102 - DNA, 20 bp, synthetic construct
  source 1..20: mol_type = other DNA; note = Description of Artificial Sequence: Synthetic oligonucleotide
ataaacttacacaataaaaa

SEQ ID NO: 24103 - DNA, 20 bp, synthetic construct
  source 1..20: mol_type = other DNA; note = Description of Artificial Sequence: Synthetic oligonucleotide
tataaacttacacaataaaa

SEQ ID NO: 24104 - DNA, 20 bp, synthetic construct
  source 1..20: mol_type = other DNA; note = Description of Artificial Sequence: Synthetic oligonucleotide
ttataaacttacacaataaa

SEQ ID NO: 24105 - DNA, 20 bp, synthetic construct
  source 1..20: mol_type = other DNA; note = Description of Artificial Sequence: Synthetic oligonucleotide
attataaacttacacaataa

SEQ ID NO: 24106 - DNA, 20 bp, synthetic construct
  source 1..20: mol_type = other DNA; note = Description of Artificial Sequence: Synthetic oligonucleotide
cattataaacttacacaata

SEQ ID NO: 24107 - DNA, 20 bp, synthetic construct
  source 1..20: mol_type = other DNA; note = Description of Artificial Sequence: Synthetic oligonucleotide
gcattataaacttacacaat

SEQ ID NO: 24108 - DNA, 20 bp, synthetic construct
  source 1..20: mol_type = other DNA; note = Description of Artificial Sequence: Synthetic oligonucleotide
tgcattataaacttacacaa

SEQ ID NO: 24109 - DNA, 20 bp, synthetic construct
  source 1..20: mol_type = other DNA; note = Description of Artificial Sequence: Synthetic oligonucleotide
ctgcattataaacttacaca

SEQ ID NO: 24110 - DNA, 20 bp, synthetic construct
  source 1..20: mol_type = other DNA; note = Description of Artificial Sequence: Synthetic oligonucleotide
cctgcattataaacttacac

SEQ ID NO: 24111 - DNA, 20 bp, synthetic construct
  source 1..20: mol_type = other DNA; note = Description of Artificial Sequence: Synthetic oligonucleotide
ccctgcattataaacttaca

SEQ ID NO: 24112 - DNA, 20 bp, synthetic construct
  source 1..20: mol_type = other DNA; note = Description of Artificial Sequence: Synthetic oligonucleotide
cccctgcattataaacttac

SEQ ID NO: 24113 - DNA, 20 bp, synthetic construct
  source 1..20: mol_type = other DNA; note = Description of Artificial Sequence: Synthetic oligonucleotide
tcccctgcattataaactta

SEQ ID NO: 24114 - DNA, 20 bp, synthetic construct
  source 1..20: mol_type = other DNA; note = Description of Artificial Sequence: Synthetic oligonucleotide
ttcccctgcattataaactt

SEQ ID NO: 24115 - DNA, 20 bp, synthetic construct
  source 1..20: mol_type = other DNA; note = Description of Artificial Sequence: Synthetic oligonucleotide
cttcccctgcattataaact

SEQ ID NO: 24116 - DNA, 20 bp, synthetic construct
  source 1..20: mol_type = other DNA; note = Description of Artificial Sequence: Synthetic oligonucleotide
acttcccctgcattataaac

SEQ ID NO: 24117 - DNA, 20 bp, synthetic construct
  source 1..20: mol_type = other DNA; note = Description of Artificial Sequence: Synthetic oligonucleotide
tacttcccctgcattataaa

SEQ ID NO: 24118 - DNA, 20 bp, synthetic construct
  source 1..20: mol_type = other DNA; note = Description of Artificial Sequence: Synthetic oligonucleotide
gtacttcccctgcattataa

SEQ ID NO: 24119 - DNA, 20 bp, synthetic construct
  source 1..20: mol_type = other DNA; note = Description of Artificial Sequence: Synthetic oligonucleotide
agtacttcccctgcattata

SEQ ID NO: 24120 - DNA, 20 bp, synthetic construct
  source 1..20: mol_type = other DNA; note = Description of Artificial Sequence: Synthetic oligonucleotide
tagtacttcccctgcattat

SEQ ID NO: 24121 - DNA, 20 bp, synthetic construct
  source 1..20: mol_type = other DNA; note = Description of Artificial Sequence: Synthetic oligonucleotide
gtagtacttcccctgcatta

SEQ ID NO: 24122 - DNA, 20 bp, synthetic construct
  source 1..20: mol_type = other DNA; note = Description of Artificial Sequence: Synthetic oligonucleotide
agtagtacttcccctgcatt

SEQ ID NO: 24123 - DNA, 20 bp, synthetic construct
  source 1..20: mol_type = other DNA; note = Description of Artificial Sequence: Synthetic oligonucleotide
gagtagtacttcccctgcat

SEQ ID NO: 24124 - DNA, 20 bp, synthetic construct
  source 1..20: mol_type = other DNA; note = Description of Artificial Sequence: Synthetic oligonucleotide
ggagtagtacttcccctgca

SEQ ID NO: 24125 - DNA, 20 bp, synthetic construct
  source 1..20: mol_type = other DNA; note = Description of Artificial Sequence: Synthetic oligonucleotide
aggagtagtacttcccctgc

SEQ ID NO: 24126 - DNA, 20 bp, synthetic construct
  source 1..20: mol_type = other DNA; note = Description of Artificial Sequence: Synthetic oligonucleotide
gaggagtagtacttcccctg

SEQ ID NO: 24127 - DNA, 20 bp, synthetic construct
  source 1..20: mol_type = other DNA; note = Description of Artificial Sequence: Synthetic oligonucleotide
tgaggagtagtacttcccct

SEQ ID NO: 24128 - DNA, 20 bp, synthetic construct
  source 1..20: mol_type = other DNA; note = Description of Artificial Sequence: Synthetic oligonucleotide
ttgaggagtagtacttcccc

SEQ ID NO: 24129 - DNA, 20 bp, synthetic construct
  source 1..20: mol_type = other DNA; note = Description of Artificial Sequence: Synthetic oligonucleotide
tttgaggagtagtacttccc

SEQ ID NO: 24130 - DNA, 20 bp, synthetic construct
  source 1..20: mol_type = other DNA; note = Description of Artificial Sequence: Synthetic oligonucleotide
atttgaggagtagtacttcc

SEQ ID NO: 24131 - DNA, 20 bp, synthetic construct
  source 1..20: mol_type = other DNA; note = Description of Artificial Sequence: Synthetic oligonucleotide
catttgaggagtagtacttc

SEQ ID NO: 24132 - DNA, 20 bp, synthetic construct
  source 1..20: mol_type = other DNA; note = Description of Artificial Sequence: Synthetic oligonucleotide
acatttgaggagtagtactt

SEQ ID NO: 24133 - DNA, 20 bp, synthetic construct
  source 1..20: mol_type = other DNA; note = Description of Artificial Sequence: Synthetic oligonucleotide
aacatttgaggagtagtact

SEQ ID NO: 24134 - DNA, 20 bp, synthetic construct
  source 1..20: mol_type = other DNA; note = Description of Artificial Sequence: Synthetic oligonucleotide
caacatttgaggagtagtac

SEQ ID NO: 24135 - DNA, 20 bp, synthetic construct
  source 1..20: mol_type = other DNA; note = Description of Artificial Sequence: Synthetic oligonucleotide
tcaacatttgaggagtagta

SEQ ID NO: 24136 - DNA, 20 bp, synthetic construct
  source 1..20: mol_type = other DNA; note = Description of Artificial Sequence: Synthetic oligonucleotide
ctcaacatttgaggagtagt

SEQ ID NO: 24137 - DNA, 20 bp, synthetic construct
  source 1..20: mol_type = other DNA; note = Description of Artificial Sequence: Synthetic oligonucleotide
cctcaacatttgaggagtag

SEQ ID NO: 24138 - DNA, 20 bp, synthetic construct
  source 1..20: mol_type = other DNA; note = Description of Artificial Sequence: Synthetic oligonucleotide
ccctcaacatttgaggagta

SEQ ID NO: 24139 - DNA, 20 bp, synthetic construct
  source 1..20: mol_type = other DNA; note = Description of Artificial Sequence: Synthetic oligonucleotide
tccctcaacatttgaggagt

SEQ ID NO: 24140 - DNA, 20 bp, synthetic construct
  source 1..20: mol_type = other DNA; note = Description of Artificial Sequence: Synthetic oligonucleotide
ttccctcaacatttgaggag

SEQ ID NO: 24141 - DNA, 20 bp, synthetic construct
  source 1..20: mol_type = other DNA; note = Description of Artificial Sequence: Synthetic oligonucleotide
cttccctcaacatttgagga

SEQ ID NO: 24142 - DNA, 20 bp, synthetic construct
  source 1..20: mol_type = other DNA; note = Description of Artificial Sequence: Synthetic oligonucleotide
gcttccctcaacatttgagg

SEQ ID NO: 24143 - DNA, 20 bp, synthetic construct
  source 1..20: mol_type = other DNA; note = Description of Artificial Sequence: Synthetic oligonucleotide
agcttccctcaacatttgag

SEQ ID NO: 24144 - DNA, 20 bp, synthetic construct
  source 1..20: mol_type = other DNA; note = Description of Artificial Sequence: Synthetic oligonucleotide
aagcttccctcaacatttga

SEQ ID NO: 24145 - DNA, 20 bp, synthetic construct
  source 1..20: mol_type = other DNA; note = Description of Artificial Sequence: Synthetic oligonucleotide
gaagcttccctcaacatttg

SEQ ID NO: 24146 - DNA, 20 bp, synthetic construct
  source 1..20: mol_type = other DNA; note = Description of Artificial Sequence: Synthetic oligonucleotide
ggaagcttccctcaacattt

SEQ ID NO: 24147 - DNA, 20 bp, synthetic construct
  source 1..20: mol_type = other DNA; note = Description of Artificial Sequence: Synthetic oligonucleotide
tggaagcttccctcaacatt

SEQ ID NO: 24148 - DNA, 20 bp, synthetic construct
  source 1..20: mol_type = other DNA; note = Description of Artificial Sequence: Synthetic oligonucleotide
atggaagcttccctcaacat

SEQ ID NO: 24149 - DNA, 20 bp, synthetic construct
  source 1..20: mol_type = other DNA; note = Description of Artificial Sequence: Synthetic oligonucleotide
tatggaagcttccctcaaca

SEQ ID NO: 24150 - DNA, 20 bp, synthetic construct
  source 1..20: mol_type = other DNA; note = Description of Artificial Sequence: Synthetic oligonucleotide
ttatggaagcttccctcaac

SEQ ID NO: 24151 - DNA, 20 bp, synthetic construct
  source 1..20: mol_type = other DNA; note = Description of Artificial Sequence: Synthetic oligonucleotide
gttatggaagcttccctcaa

SEQ ID NO: 24152 - DNA, 20 bp, synthetic construct
  source 1..20: mol_type = other DNA; note = Description of Artificial Sequence: Synthetic oligonucleotide
tgttatggaagcttccctca

SEQ ID NO: 24153 - DNA, 20 bp, synthetic construct
  source 1..20: mol_type = other DNA; note = Description of Artificial Sequence: Synthetic oligonucleotide
atgttatggaagcttccctc

SEQ ID NO: 24154 - DNA, 20 bp, synthetic construct
  source 1..20: mol_type = other DNA; note = Description of Artificial Sequence: Synthetic oligonucleotide
aatgttatggaagcttccct

SEQ ID NO: 24155 - DNA, 20 bp, synthetic construct
  source 1..20: mol_type = other DNA; note = Description of Artificial Sequence: Synthetic oligonucleotide
caatgttatggaagcttccc

SEQ ID NO: 24156 - DNA, 20 bp, synthetic construct
  source 1..20: mol_type = other DNA; note = Description of Artificial Sequence: Synthetic oligonucleotide
tcaatgttatggaagcttcc

SEQ ID NO: 24157 - DNA, 20 bp, synthetic construct
  source 1..20: mol_type = other DNA; note = Description of Artificial Sequence: Synthetic oligonucleotide
atcaatgttatggaagcttc

SEQ ID NO: 24158 - DNA, 20 bp, synthetic construct
  source 1..20: mol_type = other DNA; note = Description of Artificial Sequence: Synthetic oligonucleotide
catcaatgttatggaagctt

SEQ ID NO: 24159 - DNA, 20 bp, synthetic construct
  source 1..20: mol_type = other DNA; note = Description of Artificial Sequence: Synthetic oligonucleotide
tcatcaatgttatggaagct

SEQ ID NO: 24160 - DNA, 20 bp, synthetic construct
  source 1..20: mol_type = other DNA; note = Description of Artificial Sequence: Synthetic oligonucleotide
gtcatcaatgttatggaagc

SEQ ID NO: 24161 - DNA, 20 bp, synthetic construct
  source 1..20: mol_type = other DNA; note = Description of Artificial Sequence: Synthetic oligonucleotide
agtcatcaatgttatggaag

SEQ ID NO: 24162 - DNA, 20 bp, synthetic construct
  source 1..20: mol_type = other DNA; note = Description of Artificial Sequence: Synthetic oligonucleotide
cagtcatcaatgttatggaa

SEQ ID NO: 24163 - DNA, 20 bp, synthetic construct
  source 1..20: mol_type = other DNA; note = Description of Artificial Sequence: Synthetic oligonucleotide
ccagtcatcaatgttatgga

SEQ ID NO: 24164 - DNA, 20 bp, synthetic construct
  source 1..20: mol_type = other DNA; note = Description of Artificial Sequence: Synthetic oligonucleotide
gccagtcatcaatgttatgg

SEQ ID NO: 24165 - DNA, 20 bp, synthetic construct
  source 1..20: mol_type = other DNA; note = Description of Artificial Sequence: Synthetic oligonucleotide
agccagtcatcaatgttatg

SEQ ID NO: 24166 - DNA, 20 bp, synthetic construct
  source 1..20: mol_type = other DNA; note = Description of Artificial Sequence: Synthetic oligonucleotide
aagccagtcatcaatgttat

SEQ ID NO: 24167 - DNA, 20 bp, synthetic construct
  source 1..20: mol_type = other DNA; note = Description of Artificial Sequence: Synthetic oligonucleotide
gaagccagtcatcaatgtta

SEQ ID NO: 24168 - DNA, 20 bp, synthetic construct
  source 1..20: mol_type = other DNA; note = Description of Artificial Sequence: Synthetic oligonucleotide
tgaagccagtcatcaatgtt

SEQ ID NO: 24169 - DNA, 20 bp, synthetic construct
  source 1..20: mol_type = other DNA; note = Description of Artificial Sequence: Synthetic oligonucleotide
atgaagccagtcatcaatgt

SEQ ID NO: 24170 - DNA, 20 bp, synthetic construct
  source 1..20: mol_type = other DNA; note = Description of Artificial Sequence: Synthetic oligonucleotide
catgaagccagtcatcaatg

SEQ ID NO: 24171 - DNA, 20 bp, synthetic construct
  source 1..20: mol_type = other DNA; note = Description of Artificial Sequence: Synthetic oligonucleotide
ccatgaagccagtcatcaat

SEQ ID NO: 24172 - DNA, 20 bp, synthetic construct
  source 1..20: mol_type = other DNA; note = Description of Artificial Sequence: Synthetic oligonucleotide
gccatgaagccagtcatcaa

SEQ ID NO: 24173 - DNA, 20 bp, synthetic construct
  source 1..20: mol_type = other DNA; note = Description of Artificial Sequence: Synthetic oligonucleotide
tgccatgaagccagtcatca

SEQ ID NO: 24174 - DNA, 20 bp, synthetic construct
  source 1..20: mol_type = other DNA; note = Description of Artificial Sequence: Synthetic oligonucleotide
ctgccatgaagccagtcatc

SEQ ID NO: 24175 - DNA, 20 bp, synthetic construct
  source 1..20: mol_type = other DNA; note = Description of Artificial Sequence: Synthetic oligonucleotide
actgccatgaagccagtcat

SEQ ID NO: 24176 - DNA, 20 bp, synthetic construct
  source 1..20: mol_type = other DNA; note = Description of Artificial Sequence: Synthetic oligonucleotide
tactgccatgaagccagtca

SEQ ID NO: 24177 - DNA, 20 bp, synthetic construct
  source 1..20: mol_type = other DNA; note = Description of Artificial Sequence: Synthetic oligonucleotide
ttactgccatgaagccagtc

SEQ ID NO: 24178 - DNA, 20 bp, synthetic construct
  source 1..20: mol_type = other DNA; note = Description of Artificial Sequence: Synthetic oligonucleotide
attactgccatgaagccagt

SEQ ID NO: 24179 - DNA, 20 bp, synthetic construct
  source 1..20: mol_type = other DNA; note = Description of Artificial Sequence: Synthetic oligonucleotide
aattactgccatgaagccag

SEQ ID NO: 24180 - DNA, 20 bp, synthetic construct
  source 1..20: mol_type = other DNA; note = Description of Artificial Sequence: Synthetic oligonucleotide
gaattactgccatgaagcca

SEQ ID NO: 24181 - DNA, 20 bp, synthetic construct
  source 1..20: mol_type = other DNA; note = Description of Artificial Sequence: Synthetic oligonucleotide
agaattactgccatgaagcc

SEQ ID NO: 24182 - DNA, 20 bp, synthetic construct
  source 1..20: mol_type = other DNA; note = Description of Artificial Sequence: Synthetic oligonucleotide
gagaattactgccatgaagc

SEQ ID NO: 24183 - DNA, 20 bp, synthetic construct
  source 1..20: mol_type = other DNA; note = Description of Artificial Sequence: Synthetic oligonucleotide
cgagaattactgccatgaag

SEQ ID NO: 24184 - DNA, 20 bp, synthetic construct
  source 1..20: mol_type = other DNA; note = Description of Artificial Sequence: Synthetic oligonucleotide
ccgagaattactgccatgaa

SEQ ID NO: 24185 - DNA, 20 bp, synthetic construct
  source 1..20: mol_type = other DNA; note = Description of Artificial Sequence: Synthetic oligonucleotide
gccgagaattactgccatga

SEQ ID NO: 24186 - DNA, 20 bp, synthetic construct
  source 1..20: mol_type = other DNA; note = Description of Artificial Sequence: Synthetic oligonucleotide
agccgagaattactgccatg

SEQ ID NO: 24187 - DNA, 20 bp, synthetic construct
  source 1..20: mol_type = other DNA; note = Description of Artificial Sequence: Synthetic oligonucleotide
cagccgagaattactgccat

SEQ ID NO: 24188 - DNA, 20 bp, synthetic construct
  source 1..20: mol_type = other DNA; note = Description of Artificial Sequence: Synthetic oligonucleotide
acagccgagaattactgcca

SEQ ID NO: 24189 - DNA, 20 bp, synthetic construct
  source 1..20: mol_type = other DNA; note = Description of Artificial Sequence: Synthetic oligonucleotide
tacagccgagaattactgcc

SEQ ID NO: 24190 - DNA, 20 bp, synthetic construct
  source 1..20: mol_type = other DNA; note = Description of Artificial Sequence: Synthetic oligonucleotide
ctacagccgagaattactgc

SEQ ID NO: 24191 - DNA, 20 bp, synthetic construct
  source 1..20: mol_type = other DNA; note = Description of Artificial Sequence: Synthetic oligonucleotide
actacagccgagaattactg

SEQ ID NO: 24192 - DNA, 20 bp, synthetic construct
  source 1..20: mol_type = other DNA; note = Description of Artificial Sequence: Synthetic oligonucleotide
aactacagccgagaattact

SEQ ID NO: 24193 - DNA, 20 bp, synthetic construct
  source 1..20: mol_type = other DNA; note = Description of Artificial Sequence: Synthetic oligonucleotide
caactacagccgagaattac

SEQ ID NO: 24194 - DNA, 20 bp, synthetic construct
  source 1..20: mol_type = other DNA; note = Description of Artificial Sequence: Synthetic oligonucleotide
gcaactacagccgagaatta

SEQ ID NO: 24195 - DNA, 20 bp, synthetic construct
  source 1..20: mol_type = other DNA; note = Description of Artificial Sequence: Synthetic oligonucleotide
tgcaactacagccgagaatt

SEQ ID NO: 24196 - DNA, 20 bp, synthetic construct
  source 1..20: mol_type = other DNA; note = Description of Artificial Sequence: Synthetic oligonucleotide
atgcaactacagccgagaat

SEQ ID NO: 24197 - DNA, 20 bp, synthetic construct
  source 1..20: mol_type = other DNA; note = Description of Artificial Sequence: Synthetic oligonucleotide
tatgcaactacagccgagaa

SEQ ID NO: 24198 - DNA, 20 bp, synthetic construct
  source 1..20: mol_type = other DNA; note = Description of Artificial Sequence: Synthetic oligonucleotide
ttatgcaactacagccgaga

SEQ ID NO: 24199 - DNA, 20 bp, synthetic construct
  source 1..20: mol_type = other DNA; note = Description of Artificial Sequence: Synthetic oligonucleotide
cttatgcaactacagccgag

SEQ ID NO: 24200 - DNA, 20 bp, synthetic construct
  source 1..20: mol_type = other DNA; note = Description of Artificial Sequence: Synthetic oligonucleotide
gcttatgcaactacagccga

SEQ ID NO: 24201 - DNA, 20 bp, synthetic construct
  source 1..20: mol_type = other DNA; note = Description of Artificial Sequence: Synthetic oligonucleotide
tgcttatgcaactacagccg

SEQ ID NO: 24202 - DNA, 20 bp, synthetic construct
  source 1..20: mol_type = other DNA; note = Description of Artificial Sequence: Synthetic oligonucleotide
atgcttatgcaactacagcc

SEQ ID NO: 24203 - DNA, 20 bp, synthetic construct
  source 1..20: mol_type = other DNA; note = Description of Artificial Sequence: Synthetic oligonucleotide
aatgcttatgcaactacagc

SEQ ID NO: 24204 - DNA, 20 bp, synthetic construct
  source 1..20: mol_type = other DNA; note = Description of Artificial Sequence: Synthetic oligonucleotide
caatgcttatgcaactacag

SEQ ID NO: 24205 - DNA, 20 bp, synthetic construct
  source 1..20: mol_type = other DNA; note = Description of Artificial Sequence: Synthetic oligonucleotide
gcaatgcttatgcaactaca

SEQ ID NO: 24206 - DNA, 20 bp, synthetic construct
  source 1..20: mol_type = other DNA; note = Description of Artificial Sequence: Synthetic oligonucleotide
agcaatgcttatgcaactac

SEQ ID NO: 24207 - DNA, 20 bp, synthetic construct
  source 1..20: mol_type = other DNA; note = Description of Artificial Sequence: Synthetic oligonucleotide
gagcaatgcttatgcaacta

SEQ ID NO: 24208 - DNA, 20 bp, synthetic construct
  source 1..20: mol_type = other DNA; note = Description of Artificial Sequence: Synthetic oligonucleotide
tgagcaatgcttatgcaact

SEQ ID NO: 24209 - DNA, 20 bp, synthetic construct
  source 1..20: mol_type = other DNA; note = Description of Artificial Sequence: Synthetic oligonucleotide
ttgagcaatgcttatgcaac

SEQ ID NO: 24210 - DNA, 20 bp, synthetic construct
  source 1..20: mol_type = other DNA; note = Description of Artificial Sequence: Synthetic oligonucleotide
cttgagcaatgcttatgcaa

SEQ ID NO: 24211 - DNA, 20 bp, synthetic construct
  source 1..20: mol_type = other DNA; note = Description of Artificial Sequence: Synthetic oligonucleotide
tcttgagcaatgcttatgca

SEQ ID NO: 24212 - DNA, 20 bp, synthetic construct
  source 1..20: mol_type = other DNA; note = Description of Artificial Sequence: Synthetic oligonucleotide
ctcttgagcaatgcttatgc

SEQ ID NO: 24213 - DNA, 20 bp, synthetic construct
  source 1..20: mol_type = other DNA; note = Description of Artificial Sequence: Synthetic oligonucleotide
cctcttgagcaatgcttatg

SEQ ID NO: 24214 - DNA, 20 bp, synthetic construct
  source 1..20: mol_type = other DNA; note = Description of Artificial Sequence: Synthetic oligonucleotide
tcctcttgagcaatgcttat

SEQ ID NO: 24215 - DNA, 20 bp, synthetic construct
  source 1..20: mol_type = other DNA; note = Description of Artificial Sequence: Synthetic oligonucleotide
ttcctcttgagcaatgctta

SEQ ID NO: 24216 - DNA, 20 bp, synthetic construct
  source 1..20: mol_type = other DNA; note = Description of Artificial Sequence: Synthetic oligonucleotide
tttcctcttgagcaatgctt

SEQ ID NO: 24217 - DNA, 20 bp, synthetic construct
  source 1..20: mol_type = other DNA; note = Description of Artificial Sequence: Synthetic oligonucleotide
ttttcctcttgagcaatgct

SEQ ID NO: 24218 - DNA, 20 bp, synthetic construct
  source 1..20: mol_type = other DNA; note = Description of Artificial Sequence: Synthetic oligonucleotide
attttcctcttgagcaatgc

SEQ ID NO: 24219 - DNA, 20 bp, synthetic construct
  source 1..20: mol_type = other DNA; note = Description of Artificial Sequence: Synthetic oligonucleotide
gattttcctcttgagcaatg

SEQ ID NO: 24220 - DNA, 20 bp, synthetic construct
  source 1..20: mol_type = other DNA; note = Description of Artificial Sequence: Synthetic oligonucleotide
ggattttcctcttgagcaat

SEQ ID NO: 24221 - DNA, 20 bp, synthetic construct
  source 1..20: mol_type = other DNA; note = Description of Artificial Sequence: Synthetic oligonucleotide
tggattttcctcttgagcaa

SEQ ID NO: 24222 - DNA, 20 bp, synthetic construct
  source 1..20: mol_type = other DNA; note = Description of Artificial Sequence: Synthetic oligonucleotide
ttggattttcctcttgagca

SEQ ID NO: 24223 - DNA, 20 bp, synthetic construct
  source 1..20: mol_type = other DNA; note = Description of Artificial Sequence: Synthetic oligonucleotide
tttggattttcctcttgagc

SEQ ID NO: 24224 - DNA, 20 bp, synthetic construct
  source 1..20: mol_type = other DNA; note = Description of Artificial Sequence: Synthetic oligonucleotide
ttttggattttcctcttgag

SEQ ID NO: 24225 - DNA, 20 bp, synthetic construct
  source 1..20: mol_type = other DNA; note = Description of Artificial Sequence: Synthetic oligonucleotide
cttttggattttcctcttga

SEQ ID NO: 24226 - DNA, 20 bp, synthetic construct
  source 1..20: mol_type = other DNA; note = Description of Artificial Sequence: Synthetic oligonucleotide
acttttggattttcctcttg

SEQ ID NO: 24227 - DNA, 20 bp, synthetic construct
  source 1..20: mol_type = other DNA; note = Description of Artificial Sequence: Synthetic oligonucleotide
cacttttggattttcctctt

SEQ ID NO: 24228 - DNA, 20 bp, synthetic construct
  source 1..20: mol_type = other DNA; note = Description of Artificial Sequence: Synthetic oligonucleotide
gcacttttggattttcctct

SEQ ID NO: 24229 - DNA, 20 bp, synthetic construct
  source 1..20: mol_type = other DNA; note = Description of Artificial Sequence: Synthetic oligonucleotide
tgcacttttggattttcctc

SEQ ID NO: 24230 - DNA, 20 bp, synthetic construct
  source 1..20: mol_type = other DNA; note = Description of Artificial Sequence: Synthetic oligonucleotide
ctgcacttttggattttcct

SEQ ID NO: 24231 - DNA, 20 bp, synthetic construct
  source 1..20: mol_type = other DNA; note = Description of Artificial Sequence: Synthetic oligonucleotide
gctgcacttttggattttcc

SEQ ID NO: 24232 - DNA, 20 bp, synthetic construct
  source 1..20: mol_type = other DNA; note = Description of Artificial Sequence: Synthetic oligonucleotide
tgctgcacttttggattttc

SEQ ID NO: 24233 - DNA, 20 bp, synthetic construct
  source 1..20: mol_type = other DNA; note = Description of Artificial Sequence: Synthetic oligonucleotide
ctgctgcacttttggatttt

SEQ ID NO: 24234 - DNA, 20 bp, synthetic construct
  source 1..20: mol_type = other DNA; note = Description of Artificial Sequence: Synthetic oligonucleotide
cctgctgcacttttggattt

SEQ ID NO: 24235 - DNA, 20 bp, synthetic construct
  source 1..20: mol_type = other DNA; note = Description of Artificial Sequence: Synthetic oligonucleotide
tcctgctgcacttttggatt

SEQ ID NO: 24236 - DNA, 20 bp, synthetic construct
  source 1..20: mol_type = other DNA; note = Description of Artificial Sequence: Synthetic oligonucleotide
ctcctgctgcacttttggat

SEQ ID NO: 24237 - DNA, 20 bp, synthetic construct
  source 1..20: mol_type = other DNA; note = Description of Artificial Sequence: Synthetic oligonucleotide
tctcctgctgcacttttgga

SEQ ID NO: 24238 - DNA, 20 bp, synthetic construct
  source 1..20: mol_type = other DNA; note = Description of Artificial Sequence: Synthetic oligonucleotide
ttctcctgctgcacttttgg

SEQ ID NO: 24239 - DNA, 20 bp, synthetic construct
  source 1..20: mol_type = other DNA; note = Description of Artificial Sequence: Synthetic oligonucleotide
gttctcctgctgcacttttg

SEQ ID NO: 24240 - DNA, 20 bp, synthetic construct
  source 1..20: mol_type = other DNA; note = Description of Artificial Sequence: Synthetic oligonucleotide
agttctcctgctgcactttt

SEQ ID NO: 24241 - DNA, 20 bp, synthetic construct
  source 1..20: mol_type = other DNA; note = Description of Artificial Sequence: Synthetic oligonucleotide
gagttctcctgctgcacttt

SEQ ID NO: 24242 - DNA, 20 bp, synthetic construct
  source 1..20: mol_type = other DNA; note = Description of Artificial Sequence: Synthetic oligonucleotide
agagttctcctgctgcactt

SEQ ID NO: 24243 - DNA, 20 bp, synthetic construct
  source 1..20: mol_type = other DNA; note = Description of Artificial Sequence: Synthetic oligonucleotide
aagagttctcctgctgcact

SEQ ID NO: 24244 - DNA, 20 bp, synthetic construct
  source 1..20: mol_type = other DNA; note = Description of Artificial Sequence: Synthetic oligonucleotide
aaagagttctcctgctgcac

SEQ ID NO: 24245 - DNA, 20 bp, synthetic construct
  source 1..20: mol_type = other DNA; note = Description of Artificial Sequence: Synthetic oligonucleotide
aaaagagttctcctgctgca

SEQ ID NO: 24246 - DNA, 20 bp, synthetic construct
  source 1..20: mol_type = other DNA; note = Description of Artificial Sequence: Synthetic oligonucleotide
gaaaagagttctcctgctgc

SEQ ID NO: 24247 - DNA, 20 bp, synthetic construct
  source 1..20: mol_type = other DNA; note = Description of Artificial Sequence: Synthetic oligonucleotide
ggaaaagagttctcctgctg

SEQ ID NO: 24248 - DNA, 20 bp, synthetic construct
  source 1..20: mol_type = other DNA; note = Description of Artificial Sequence: Synthetic oligonucleotide
gggaaaagagttctcctgct

SEQ ID NO: 24249 - DNA, 20 bp, synthetic construct
  source 1..20: mol_type = other DNA; note = Description of Artificial Sequence: Synthetic oligonucleotide
agggaaaagagttctcctgc

SEQ ID NO: 24250 - DNA, 20 bp, synthetic construct
  source 1..20: mol_type = other DNA; note = Description of Artificial Sequence: Synthetic oligonucleotide
cagggaaaagagttctcctg

SEQ ID NO: 24251 - DNA, 20 bp, synthetic construct
  source 1..20: mol_type = other DNA; note = Description of Artificial Sequence: Synthetic oligonucleotide
tcagggaaaagagttctcct

SEQ ID NO: 24252 - DNA, 20 bp, synthetic construct
  source 1..20: mol_type = other DNA; note = Description of Artificial Sequence: Synthetic oligonucleotide
ttcagggaaaagagttctcc

SEQ ID NO: 24253 - DNA, 20 bp, synthetic construct
  source 1..20: mol_type = other DNA; note = Description of Artificial Sequence: Synthetic oligonucleotide
tttcagggaaaagagttctc

SEQ ID NO: 24254 - DNA, 20 bp, synthetic construct
  source 1..20: mol_type = other DNA; note = Description of Artificial Sequence: Synthetic oligonucleotide
ttttcagggaaaagagttct

SEQ ID NO: 24255 - DNA, 20 bp, synthetic construct
  source 1..20: mol_type = other DNA; note = Description of Artificial Sequence: Synthetic oligonucleotide
tttttcagggaaaagagttc

SEQ ID NO: 24256 - DNA, 20 bp, synthetic construct
  source 1..20: mol_type = other DNA; note = Description of Artificial Sequence: Synthetic oligonucleotide
ctttttcagggaaaagagtt

SEQ ID NO: 24257 - DNA, 20 bp, synthetic construct
  source 1..20: mol_type = other DNA; note = Description of Artificial Sequence: Synthetic oligonucleotide
cctttttcagggaaaagagt

SEQ ID NO: 24258 - DNA, 20 bp, synthetic construct
  source 1..20: mol_type = other DNA; note = Description of Artificial Sequence: Synthetic oligonucleotide
tcctttttcagggaaaagag

SEQ ID NO: 24259 - DNA, 20 bp, synthetic construct
  source 1..20: mol_type = other DNA; note = Description of Artificial Sequence: Synthetic oligonucleotide
ttcctttttcagggaaaaga

SEQ ID NO: 24260 - DNA, 20 bp, synthetic construct
  source 1..20: mol_type = other DNA; note = Description of Artificial Sequence: Synthetic oligonucleotide
tttcctttttcagggaaaag

SEQ ID NO: 24261 - DNA, 20 bp, synthetic construct
  source 1..20: mol_type = other DNA; note = Description of Artificial Sequence: Synthetic oligonucleotide
ttttcctttttcagggaaaa

SEQ ID NO: 24262 - DNA, 20 bp, synthetic construct
  source 1..20: mol_type = other DNA; note = Description of Artificial Sequence: Synthetic oligonucleotide
tttttcctttttcagggaaa

SEQ ID NO: 24263 - DNA, 20 bp, synthetic construct
  source 1..20: mol_type = other DNA; note = Description of Artificial Sequence: Synthetic oligonucleotide
atttttcctttttcagggaa

SEQ ID NO: 24264 - DNA, 20 bp, synthetic construct
  source 1..20: mol_type = other DNA; note = Description of Artificial Sequence: Synthetic oligonucleotide
tatttttcctttttcaggga

SEQ ID NO: 24265 - DNA, 20 bp, synthetic construct
  source 1..20: mol_type = other DNA; note = Description of Artificial Sequence: Synthetic oligonucleotide
atatttttcctttttcaggg

SEQ ID NO: 24266 - DNA, 20 bp, synthetic construct
  source 1..20: mol_type = other DNA; note = Description of Artificial Sequence: Synthetic oligonucleotide
aatatttttcctttttcagg

SEQ ID NO: 24267 - DNA, 20 bp, synthetic construct
  source 1..20: mol_type = other DNA; note = Description of Artificial Sequence: Synthetic oligonucleotide
caatatttttcctttttcag

SEQ ID NO: 24268 - DNA, 20 bp, synthetic construct
  source 1..20: mol_type = other DNA; note = Description of Artificial Sequence: Synthetic oligonucleotide
tcaatatttttcctttttca

SEQ ID NO: 24269 - DNA, 20 bp, synthetic construct
  source 1..20: mol_type = other DNA; note = Description of Artificial Sequence: Synthetic oligonucleotide
ttcaatatttttcctttttc

SEQ ID NO: 24270 - DNA, 20 bp, synthetic construct
  source 1..20: mol_type = other DNA; note = Description of Artificial Sequence: Synthetic oligonucleotide
gttcaatatttttccttttt

SEQ ID NO: 24271 - DNA, 20 bp, synthetic construct
  source 1..20: mol_type = other DNA; note = Description of Artificial Sequence: Synthetic oligonucleotide
agttcaatatttttcctttt

SEQ ID NO: 24272 - DNA, 20 bp, synthetic construct
  source 1..20: mol_type = other DNA; note = Description of Artificial Sequence: Synthetic oligonucleotide
gagttcaatatttttccttt

SEQ ID NO: 24273 - DNA, 20 bp, synthetic construct
  source 1..20: mol_type = other DNA; note = Description of Artificial Sequence: Synthetic oligonucleotide
tgagttcaatatttttcctt

SEQ ID NO: 24274 - DNA, 20 bp, synthetic construct
  source 1..20: mol_type = other DNA; note = Description of Artificial Sequence: Synthetic oligonucleotide
ttgagttcaatatttttcct

SEQ ID NO: 24275 - DNA, 20 bp, synthetic construct
  source 1..20: mol_type = other DNA; note = Description of Artificial Sequence: Synthetic oligonucleotide
attgagttcaatatttttcc

SEQ ID NO: 24276 - DNA, 20 bp, synthetic construct
  source 1..20: mol_type = other DNA; note = Description of Artificial Sequence: Synthetic oligonucleotide
cattgagttcaatatttttc

SEQ ID NO: 24277 - DNA, 20 bp, synthetic construct
  source 1..20: mol_type = other DNA; note = Description of Artificial Sequence: Synthetic oligonucleotide
tcattgagttcaatattttt

SEQ ID NO: 24278 - DNA, 20 bp, synthetic construct
  source 1..20: mol_type = other DNA; note = Description of Artificial Sequence: Synthetic oligonucleotide
atcattgagttcaatatttt

SEQ ID NO: 24279 - DNA, 20 bp, synthetic construct
  source 1..20: mol_type = other DNA; note = Description of Artificial Sequence: Synthetic oligonucleotide
tatcattgagttcaatattt

SEQ ID NO: 24280 - DNA, 20 bp, synthetic construct
  source 1..20: mol_type = other DNA; note = Description of Artificial Sequence: Synthetic oligonucleotide
ctatcattgagttcaatatt

SEQ ID NO: 24281 - DNA, 20 bp, synthetic construct
  source 1..20: mol_type = other DNA; note = Description of Artificial Sequence: Synthetic oligonucleotide
gctatcattgagttcaatat

SEQ ID NO: 24282 - DNA, 20 bp, synthetic construct
  source 1..20: mol_type = other DNA; note = Description of Artificial Sequence: Synthetic oligonucleotide
tgctatcattgagttcaata

SEQ ID NO: 24283 - DNA, 20 bp, synthetic construct
  source 1..20: mol_type = other DNA; note = Description of Artificial Sequence: Synthetic oligonucleotide
gtgctatcattgagttcaat

SEQ ID NO: 24284 - DNA, 20 bp, synthetic construct
  source 1..20: mol_type = other DNA; note = Description of Artificial Sequence: Synthetic oligonucleotide
ggtgctatcattgagttcaa

SEQ ID NO: 24285 - DNA, 20 bp, synthetic construct
  source 1..20: mol_type = other DNA; note = Description of Artificial Sequence: Synthetic oligonucleotide
aggtgctatcattgagttca

SEQ ID NO: 24286 - DNA, 20 bp, synthetic construct
  source 1..20: mol_type = other DNA; note = Description of Artificial Sequence: Synthetic oligonucleotide
taggtgctatcattgagttc

SEQ ID NO: 24287 - DNA, 20 bp, synthetic construct
  source 1..20: mol_type = other DNA; note = Description of Artificial Sequence: Synthetic oligonucleotide
ttaggtgctatcattgagtt

SEQ ID NO: 24288 - DNA, 20 bp, synthetic construct
  source 1..20: mol_type = other DNA; note = Description of Artificial Sequence: Synthetic oligonucleotide
tttaggtgctatcattgagt

SEQ ID NO: 24289 - DNA, 20 bp, synthetic construct
  source 1..20: mol_type = other DNA; note = Description of Artificial Sequence: Synthetic oligonucleotide
gtttaggtgctatcattgag

SEQ ID NO: 24290 - DNA, 20 bp, synthetic construct
  source 1..20: mol_type = other DNA; note = Description of Artificial Sequence: Synthetic oligonucleotide
agtttaggtgctatcattga

SEQ ID NO: 24291 - DNA, 20 bp, synthetic construct
  source 1..20: mol_type = other DNA; note = Description of Artificial Sequence: Synthetic oligonucleotide
aagtttaggtgctatcattg

SEQ ID NO: 24292 - DNA, 20 bp, synthetic construct
  source 1..20: mol_type = other DNA; note = Description of Artificial Sequence: Synthetic oligonucleotide
taagtttaggtgctatcatt

SEQ ID NO: 24293 - DNA, 20 bp, synthetic construct
  source 1..20: mol_type = other DNA; note = Description of Artificial Sequence: Synthetic oligonucleotide
gtaagtttaggtgctatcat

SEQ ID NO: 24294 - DNA, 20 bp, synthetic construct
  source 1..20: mol_type = other DNA; note = Description of Artificial Sequence: Synthetic oligonucleotide
tgtaagtttaggtgctatca

SEQ ID NO: 24295 - DNA, 20 bp, synthetic construct
  source 1..20: mol_type = other DNA; note = Description of Artificial Sequence: Synthetic oligonucleotide
atgtaagtttaggtgctatc

SEQ ID NO: 24296 - DNA, 20 bp, synthetic construct
  source 1..20: mol_type = other DNA; note = Description of Artificial Sequence: Synthetic oligonucleotide
aatgtaagtttaggtgctat

SEQ ID NO: 24297 - DNA, 20 bp, synthetic construct
  source 1..20: mol_type = other DNA; note = Description of Artificial Sequence: Synthetic oligonucleotide
aaatgtaagtttaggtgcta

SEQ ID NO: 24298 - DNA, 20 bp, synthetic construct
  source 1..20: mol_type = other DNA; note = Description of Artificial Sequence: Synthetic oligonucleotide
taaatgtaagtttaggtgct

SEQ ID NO: 24299 - DNA, 20 bp, synthetic construct
  source 1..20: mol_type = other DNA; note = Description of Artificial Sequence: Synthetic oligonucleotide
ttaaatgtaagtttaggtgc

SEQ ID NO: 24300 - DNA, 20 bp, synthetic construct
  source 1..20: mol_type = other DNA; note = Description of Artificial Sequence: Synthetic oligonucleotide
tttaaatgtaagtttaggtg

SEQ ID NO: 24301 - DNA, 20 bp, synthetic construct
  source 1..20: mol_type = other DNA; note = Description of Artificial Sequence: Synthetic oligonucleotide
ttttaaatgtaagtttaggt

SEQ ID NO: 24302 - DNA, 20 bp, synthetic construct
  source 1..20: mol_type = other DNA; note = Description of Artificial Sequence: Synthetic oligonucleotide
cttttaaatgtaagtttagg

SEQ ID NO: 24303 - DNA, 20 bp, synthetic construct
  source 1..20: mol_type = other DNA; note = Description of Artificial Sequence: Synthetic oligonucleotide
tcttttaaatgtaagtttag

SEQ ID NO: 24304 - DNA, 20 bp, synthetic construct
  source 1..20: mol_type = other DNA; note = Description of Artificial Sequence: Synthetic oligonucleotide
gtcttttaaatgtaagttta

SEQ ID NO: 24305 - DNA, 20 bp, synthetic construct
  source 1..20: mol_type = other DNA; note = Description of Artificial Sequence: Synthetic oligonucleotide
tgtcttttaaatgtaagttt

SEQ ID NO: 24306 - DNA, 20 bp, synthetic construct
  source 1..20: mol_type = other DNA; note = Description of Artificial Sequence: Synthetic oligonucleotide
ctgtcttttaaatgtaagtt

SEQ ID NO: 24307 - DNA, 20 bp, synthetic construct
  source 1..20: mol_type = other DNA; note = Description of Artificial Sequence: Synthetic oligonucleotide
tctgtcttttaaatgtaagt

SEQ ID NO: 24308 - DNA, 20 bp, synthetic construct
  source 1..20: mol_type = other DNA; note = Description of Artificial Sequence: Synthetic oligonucleotide
gtctgtcttttaaatgtaag

SEQ ID NO: 24309 - DNA, 20 bp, synthetic construct
  source 1..20: mol_type = other DNA; note = Description of Artificial Sequence: Synthetic oligonucleotide
tgtctgtcttttaaatgtaa

SEQ ID NO: 24310 - DNA, 20 bp, synthetic construct
  source 1..20: mol_type = other DNA; note = Description of Artificial Sequence: Synthetic oligonucleotide
atgtctgtcttttaaatgta

SEQ ID NO: 24311 - DNA, 20 bp, synthetic construct
  source 1..20: mol_type = other DNA; note = Description of Artificial Sequence: Synthetic oligonucleotide
aatgtctgtcttttaaatgt

SEQ ID NO: 24312 - DNA, 20 bp, synthetic construct
  source 1..20: mol_type = other DNA; note = Description of Artificial Sequence: Synthetic oligonucleotide
gaatgtctgtcttttaaatg

SEQ ID NO: 24313 - DNA, 20 bp, synthetic construct
  source 1..20: mol_type = other DNA; note = Description of Artificial Sequence: Synthetic oligonucleotide
ggaatgtctgtcttttaaat

SEQ ID NO: 24314 - DNA, 20 bp, synthetic construct
  source 1..20: mol_type = other DNA; note = Description of Artificial Sequence: Synthetic oligonucleotide
aggaatgtctgtcttttaaa

SEQ ID NO: 24315 - DNA, 20 bp, synthetic construct
  source 1..20: mol_type = other DNA; note = Description of Artificial Sequence: Synthetic oligonucleotide
aaggaatgtctgtcttttaa

SEQ ID NO: 24316 - DNA, 20 bp, synthetic construct
  source 1..20: mol_type = other DNA; note = Description of Artificial Sequence: Synthetic oligonucleotide
gaaggaatgtctgtctttta

SEQ ID NO: 24317 - DNA, 20 bp, synthetic construct
  source 1..20: mol_type = other DNA; note = Description of Artificial Sequence: Synthetic oligonucleotide
agaaggaatgtctgtctttt

SEQ ID NO: 24318 - DNA, 20 bp, synthetic construct
  source 1..20: mol_type = other DNA; note = Description of Artificial Sequence: Synthetic oligonucleotide
tagaaggaatgtctgtcttt

SEQ ID NO: 24319 - DNA, 20 bp, synthetic construct
  source 1..20: mol_type = other DNA; note = Description of Artificial Sequence: Synthetic oligonucleotide
gtagaaggaatgtctgtctt

SEQ ID NO: 24320 - DNA, 20 bp, synthetic construct
  source 1..20: mol_type = other DNA; note = Description of Artificial Sequence: Synthetic oligonucleotide
tgtagaaggaatgtctgtct

SEQ ID NO: 24321 - DNA, 20 bp, synthetic construct
  source 1..20: mol_type = other DNA; note = Description of Artificial Sequence: Synthetic oligonucleotide
atgtagaaggaatgtctgtc

SEQ ID NO: 24322 - DNA, 20 bp, synthetic construct
  source 1..20: mol_type = other DNA; note = Description of Artificial Sequence: Synthetic oligonucleotide
catgtagaaggaatgtctgt

SEQ ID NO: 24323 - DNA, 20 bp, synthetic construct
  source 1..20: mol_type = other DNA; note = Description of Artificial Sequence: Synthetic oligonucleotide
acatgtagaaggaatgtctg

SEQ ID NO: 24324 - DNA, 20 bp, synthetic construct
  source 1..20: mol_type = other DNA; note = Description of Artificial Sequence: Synthetic oligonucleotide
tacatgtagaaggaatgtct

SEQ ID NO: 24325 - DNA, 20 bp, synthetic construct
  source 1..20: mol_type = other DNA; note = Description of Artificial Sequence: Synthetic oligonucleotide
ttacatgtagaaggaatgtc

SEQ ID NO: 24326 - DNA, 20 bp, synthetic construct
  source 1..20: mol_type = other DNA; note = Description of Artificial Sequence: Synthetic oligonucleotide
attacatgtagaaggaatgt

SEQ ID NO: 24327 - DNA, 20 bp, synthetic construct
  source 1..20: mol_type = other DNA; note = Description of Artificial Sequence: Synthetic oligonucleotide
cattacatgtagaaggaatg

SEQ ID NO: 24328 - DNA, 20 bp, synthetic construct
  source 1..20: mol_type = other DNA; note = Description of Artificial Sequence: Synthetic oligonucleotide
tcattacatgtagaaggaat

SEQ ID NO: 24329 - DNA, 20 bp, synthetic construct
  source 1..20: mol_type = other DNA; note = Description of Artificial Sequence: Synthetic oligonucleotide
gtcattacatgtagaaggaa

SEQ ID NO: 24330 - DNA, 20 bp, synthetic construct
  source 1..20: mol_type = other DNA; note = Description of Artificial Sequence: Synthetic oligonucleotide
tgtcattacatgtagaagga

SEQ ID NO: 24331 - DNA, 20 bp, synthetic construct
  source 1..20: mol_type = other DNA; note = Description of Artificial Sequence: Synthetic oligonucleotide
gtgtcattacatgtagaagg

SEQ ID NO: 24332 - DNA, 20 bp, synthetic construct
  source 1..20: mol_type = other DNA; note = Description of Artificial Sequence: Synthetic oligonucleotide
agtgtcattacatgtagaag

SEQ ID NO: 24333 - DNA, 20 bp, synthetic construct
  source 1..20: mol_type = other DNA; note = Description of Artificial Sequence: Synthetic oligonucleotide
aagtgtcattacatgtagaa

SEQ ID NO: 24334 - DNA, 20 bp, synthetic construct
  source 1..20: mol_type = other DNA; note = Description of Artificial Sequence: Synthetic oligonucleotide
gaagtgtcattacatgtaga

SEQ ID NO: 24335 - DNA, 20 bp, synthetic construct
  source 1..20: mol_type = other DNA; note = Description of Artificial Sequence: Synthetic oligonucleotide
agaagtgtcattacatgtag

SEQ ID NO: 24336 - DNA, 20 bp, synthetic construct
  source 1..20: mol_type = other DNA; note = Description of Artificial Sequence: Synthetic oligonucleotide
aagaagtgtcattacatgta

SEQ ID NO: 24337 - DNA, 20 bp, synthetic construct
  source 1..20: mol_type = other DNA; note = Description of Artificial Sequence: Synthetic oligonucleotide
caagaagtgtcattacatgt

SEQ ID NO: 24338 - DNA, 20 bp, synthetic construct
  source 1..20: mol_type = other DNA; note = Description of Artificial Sequence: Synthetic oligonucleotide
acaagaagtgtcattacatg

SEQ ID NO: 24339 - DNA, 20 bp, synthetic construct
  source 1..20: mol_type = other DNA; note = Description of Artificial Sequence: Synthetic oligonucleotide
cacaagaagtgtcattacat

SEQ ID NO: 24340 - DNA, 20 bp, synthetic construct
  source 1..20: mol_type = other DNA; note = Description of Artificial Sequence: Synthetic oligonucleotide
acacaagaagtgtcattaca

SEQ ID NO: 24341 - DNA, 20 bp, synthetic construct
  source 1..20: mol_type = other DNA; note = Description of Artificial Sequence: Synthetic oligonucleotide
aacacaagaagtgtcattac

SEQ ID NO: 24342 - DNA, 20 bp, synthetic construct
  source 1..20: mol_type = other DNA; note = Description of Artificial Sequence: Synthetic oligonucleotide
taacacaagaagtgtcatta

SEQ ID NO: 24343 - DNA, 20 bp, synthetic construct
  source 1..20: mol_type = other DNA; note = Description of Artificial Sequence: Synthetic oligonucleotide
ttaacacaagaagtgtcatt

SEQ ID NO: 24344 - DNA, 20 bp, synthetic construct
  source 1..20: mol_type = other DNA; note = Description of Artificial Sequence: Synthetic oligonucleotide
tttaacacaagaagtgtcat

SEQ ID NO: 24345 - DNA, 20 bp, synthetic construct
  source 1..20: mol_type = other DNA; note = Description of Artificial Sequence: Synthetic oligonucleotide
gtttaacacaagaagtgtca

SEQ ID NO: 24346 - DNA, 20 bp, synthetic construct
  source 1..20: mol_type = other DNA; note = Description of Artificial Sequence: Synthetic oligonucleotide
agtttaacacaagaagtgtc

SEQ ID NO: 24347 - DNA, 20 bp, synthetic construct
  source 1..20: mol_type = other DNA; note = Description of Artificial Sequence: Synthetic oligonucleotide
tagtttaacacaagaagtgt

SEQ ID NO: 24348 - DNA, 20 bp, synthetic construct
  source 1..20: mol_type = other DNA; note = Description of Artificial Sequence: Synthetic oligonucleotide
ttagtttaacacaagaagtg

SEQ ID NO: 24349 - DNA, 20 bp, synthetic construct
  source 1..20: mol_type = other DNA; note = Description of Artificial Sequence: Synthetic oligonucleotide
tttagtttaacacaagaagt

SEQ ID NO: 24350 - DNA, 20 bp, synthetic construct
  source 1..20: mol_type = other DNA; note = Description of Artificial Sequence: Synthetic oligonucleotide
ttttagtttaacacaagaag

SEQ ID NO: 24351 - DNA, 20 bp, synthetic construct
  source 1..20: mol_type = other DNA; note = Description of Artificial Sequence: Synthetic oligonucleotide
tttttagtttaacacaagaa

SEQ ID NO: 24352 - DNA, 20 bp, synthetic construct
  source 1..20: mol_type = other DNA; note = Description of Artificial Sequence: Synthetic oligonucleotide
atttttagtttaacacaaga

SEQ ID NO: 24353 - DNA, 20 bp, synthetic construct
  source 1..20: mol_type = other DNA; note = Description of Artificial Sequence: Synthetic oligonucleotide
aatttttagtttaacacaag

SEQ ID NO: 24354 - DNA, 20 bp, synthetic construct
  source 1..20: mol_type = other DNA; note = Description of Artificial Sequence: Synthetic oligonucleotide
aaatttttagtttaacacaa

SEQ ID NO: 24355 - DNA, 20 bp, synthetic construct
  source 1..20: mol_type = other DNA; note = Description of Artificial Sequence: Synthetic oligonucleotide
taaatttttagtttaacaca

SEQ ID NO: 24356 - DNA, 20 bp, synthetic construct
  source 1..20: mol_type = other DNA; note = Description of Artificial Sequence: Synthetic oligonucleotide
gtaaatttttagtttaacac

SEQ ID NO: 24357 - DNA, 20 bp, synthetic construct
  source 1..20: mol_type = other DNA; note = Description of Artificial Sequence: Synthetic oligonucleotide
tgtaaatttttagtttaaca

SEQ ID NO: 24358 - DNA, 20 bp, synthetic construct
  source 1..20: mol_type = other DNA; note = Description of Artificial Sequence: Synthetic oligonucleotide
ttgtaaatttttagtttaac

SEQ ID NO: 24359 - DNA, 20 bp, synthetic construct
  source 1..20: mol_type = other DNA; note = Description of Artificial Sequence: Synthetic oligonucleotide
cttgtaaatttttagtttaa

SEQ ID NO: 24360 - DNA, 20 bp, synthetic construct
  source 1..20: mol_type = other DNA; note = Description of Artificial Sequence: Synthetic oligonucleotide
tcttgtaaatttttagttta

SEQ ID NO: 24361 - DNA, 20 bp, synthetic construct
  source 1..20: mol_type = other DNA; note = Description of Artificial Sequence: Synthetic oligonucleotide
ctcttgtaaatttttagttt

SEQ ID NO: 24362 - DNA, 20 bp, synthetic construct
  source 1..20: mol_type = other DNA; note = Description of Artificial Sequence: Synthetic oligonucleotide
tctcttgtaaatttttagtt

SEQ ID NO: 24363 - DNA, 20 bp, synthetic construct
  source 1..20: mol_type = other DNA; note = Description of Artificial Sequence: Synthetic oligonucleotide
ttctcttgtaaatttttagt

SEQ ID NO: 24364 - DNA, 20 bp, synthetic construct
  source 1..20: mol_type = other DNA; note = Description of Artificial Sequence: Synthetic oligonucleotide
cttctcttgtaaatttttag

SEQ ID NO: 24365 - DNA, 20 bp, synthetic construct
  source 1..20: mol_type = other DNA; note = Description of Artificial Sequence: Synthetic oligonucleotide
tcttctcttgtaaattttta

SEQ ID NO: 24366 - DNA, 20 bp, synthetic construct
  source 1..20: mol_type = other DNA; note = Description of Artificial Sequence: Synthetic oligonucleotide
ttcttctcttgtaaattttt

SEQ ID NO: 24367 - DNA, 20 bp, synthetic construct
  source 1..20: mol_type = other DNA; note = Description of Artificial Sequence: Synthetic oligonucleotide
tttcttctcttgtaaatttt

SEQ ID NO: 24368 - DNA, 20 bp, synthetic construct
  source 1..20: mol_type = other DNA; note = Description of Artificial Sequence: Synthetic oligonucleotide
ctttcttctcttgtaaattt

SEQ ID NO: 24369 - DNA, 20 bp, synthetic construct
  source 1..20: mol_type = other DNA; note = Description of Artificial Sequence: Synthetic oligonucleotide
actttcttctcttgtaaatt

SEQ ID NO: 24370 - DNA, 20 bp, synthetic construct
  source 1..20: mol_type = other DNA; note = Description of Artificial Sequence: Synthetic oligonucleotide
cactttcttctcttgtaaat

SEQ ID NO: 24371 - DNA, 20 bp, synthetic construct
  source 1..20: mol_type = other DNA; note = Description of Artificial Sequence: Synthetic oligonucleotide
tcactttcttctcttgtaaa

SEQ ID NO: 24372 - DNA, 20 bp, synthetic construct
  source 1..20: mol_type = other DNA; note = Description of Artificial Sequence: Synthetic oligonucleotide
ttcactttcttctcttgtaa

SEQ ID NO: 24373 - DNA, 20 bp, synthetic construct
  source 1..20: mol_type = other DNA; note = Description of Artificial Sequence: Synthetic oligonucleotide
tttcactttcttctcttgta

SEQ ID NO: 24374 - DNA, 20 bp, synthetic construct
  source 1..20: mol_type = other DNA; note = Description of Artificial Sequence: Synthetic oligonucleotide
ctttcactttcttctcttgt

SEQ ID NO: 24375 - DNA, 20 bp, synthetic construct
  source 1..20: mol_type = other DNA; note = Description of Artificial Sequence: Synthetic oligonucleotide
gctttcactttcttctcttg

SEQ ID NO: 24376 - DNA, 20 bp, synthetic construct
  source 1..20: mol_type = other DNA; note = Description of Artificial Sequence: Synthetic oligonucleotide
tgctttcactttcttctctt

SEQ ID NO: 24377 - DNA, 20 bp, synthetic construct
  source 1..20: mol_type = other DNA; note = Description of Artificial Sequence: Synthetic oligonucleotide
ttgctttcactttcttctct

SEQ ID NO: 24378 - DNA, 20 bp, synthetic construct
  source 1..20: mol_type = other DNA; note = Description of Artificial Sequence: Synthetic oligonucleotide
tttgctttcactttcttctc

SEQ ID NO: 24379 - DNA, 20 bp, synthetic construct
  source 1..20: mol_type = other DNA; note = Description of Artificial Sequence: Synthetic oligonucleotide
atttgctttcactttcttct

SEQ ID NO: 24380 - DNA, 20 bp, synthetic construct
  source 1..20: mol_type = other DNA; note = Description of Artificial Sequence: Synthetic oligonucleotide
catttgctttcactttcttc

SEQ ID NO: 24381 - DNA, 20 bp, synthetic construct
  source 1..20: mol_type = other DNA; note = Description of Artificial Sequence: Synthetic oligonucleotide
ccatttgctttcactttctt

SEQ ID NO: 24382 - DNA, 20 bp, synthetic construct
  source 1..20: mol_type = other DNA; note = Description of Artificial Sequence: Synthetic oligonucleotide
cccatttgctttcactttct

SEQ ID NO: 24383 - DNA, 20 bp, synthetic construct
  source 1..20: mol_type = other DNA; note = Description of Artificial Sequence: Synthetic oligonucleotide
ccccatttgctttcactttc

SEQ ID NO: 24384 - DNA, 20 bp, synthetic construct
  source 1..20: mol_type = other DNA; note = Description of Artificial Sequence: Synthetic oligonucleotide
accccatttgctttcacttt

SEQ ID NO: 24385 - DNA, 20 bp, synthetic construct
  source 1..20: mol_type = other DNA; note = Description of Artificial Sequence: Synthetic oligonucleotide
aaccccatttgctttcactt

SEQ ID NO: 24386 - DNA, 20 bp, synthetic construct
  source 1..20: mol_type = other DNA; note = Description of Artificial Sequence: Synthetic oligonucleotide
aaaccccatttgctttcact

SEQ ID NO: 24387 - DNA, 20 bp, synthetic construct
  source 1..20: mol_type = other DNA; note = Description of Artificial Sequence: Synthetic oligonucleotide
gaaaccccatttgctttcac

SEQ ID NO: 24388 - DNA, 20 bp, synthetic construct
  source 1..20: mol_type = other DNA; note = Description of Artificial Sequence: Synthetic oligonucleotide
tgaaaccccatttgctttca

SEQ ID NO: 24389 - DNA, 20 bp, synthetic construct
  source 1..20: mol_type = other DNA; note = Description of Artificial Sequence: Synthetic oligonucleotide
gtgaaaccccatttgctttc

SEQ ID NO: 24390 - DNA, 20 bp, synthetic construct
  source 1..20: mol_type = other DNA; note = Description of Artificial Sequence: Synthetic oligonucleotide
tgtgaaaccccatttgcttt

SEQ ID NO: 24391 - DNA, 20 bp, synthetic construct
  source 1..20: mol_type = other DNA; note = Description of Artificial Sequence: Synthetic oligonucleotide
ttgtgaaaccccatttgctt

SEQ ID NO: 24392 - DNA, 20 bp, synthetic construct
  source 1..20: mol_type = other DNA; note = Description of Artificial Sequence: Synthetic oligonucleotide
tttgtgaaaccccatttgct

SEQ ID NO: 24393 - DNA, 20 bp, synthetic construct
  source 1..20: mol_type = other DNA; note = Description of Artificial Sequence: Synthetic oligonucleotide
atttgtgaaaccccatttgc

SEQ ID NO: 24394 - DNA, 20 bp, synthetic construct
  source 1..20: mol_type = other DNA; note = Description of Artificial Sequence: Synthetic oligonucleotide
tatttgtgaaaccccatttg

SEQ ID NO: 24395 - DNA, 20 bp, synthetic construct
  source 1..20: mol_type = other DNA; note = Description of Artificial Sequence: Synthetic oligonucleotide
ctatttgtgaaaccccattt

SEQ ID NO: 24396 - DNA, 20 bp, synthetic construct
  source 1..20: mol_type = other DNA; note = Description of Artificial Sequence: Synthetic oligonucleotide
actatttgtgaaaccccatt

SEQ ID NO: 24397 - DNA, 20 bp, synthetic construct
  source 1..20: mol_type = other DNA; note = Description of Artificial Sequence: Synthetic oligonucleotide
aactatttgtgaaaccccat

SEQ ID NO: 24398 - DNA, 20 bp, synthetic construct
  source 1..20: mol_type = other DNA; note = Description of Artificial Sequence: Synthetic oligonucleotide
caactatttgtgaaacccca

SEQ ID NO: 24399 - DNA, 20 bp, synthetic construct
  source 1..20: mol_type = other DNA; note = Description of Artificial Sequence: Synthetic oligonucleotide
acaactatttgtgaaacccc

SEQ ID NO: 24400 - DNA, 20 bp, synthetic construct
  source 1..20: mol_type = other DNA; note = Description of Artificial Sequence: Synthetic oligonucleotide
tacaactatttgtgaaaccc

SEQ ID NO: 24401 - DNA, 20 bp, synthetic construct
  source 1..20: mol_type = other DNA; note = Description of Artificial Sequence: Synthetic oligonucleotide
ttacaactatttgtgaaacc

SEQ ID NO: 24402 - DNA, 20 bp, synthetic construct
  source 1..20: mol_type = other DNA; note = Description of Artificial Sequence: Synthetic oligonucleotide
tttacaactatttgtgaaac

SEQ ID NO: 24403 - DNA, 20 bp, synthetic construct
  source 1..20: mol_type = other DNA; note = Description of Artificial Sequence: Synthetic oligonucleotide
atttacaactatttgtgaaa

SEQ ID NO: 24404 - DNA, 20 bp, synthetic construct
  source 1..20: mol_type = other DNA; note = Description of Artificial Sequence: Synthetic oligonucleotide
tatttacaactatttgtgaa

SEQ ID NO: 24405 - DNA, 20 bp, synthetic construct
  source 1..20: mol_type = other DNA; note = Description of Artificial Sequence: Synthetic oligonucleotide
atatttacaactatttgtga

SEQ ID NO: 24406 - DNA, 20 bp, synthetic construct
  source 1..20: mol_type = other DNA; note = Description of Artificial Sequence: Synthetic oligonucleotide
tatatttacaactatttgtg

SEQ ID NO: 24407 - DNA, 20 bp, synthetic construct
  source 1..20: mol_type = other DNA; note = Description of Artificial Sequence: Synthetic oligonucleotide
ctatatttacaactatttgt

SEQ ID NO: 24408 - DNA, 20 bp, synthetic construct
  source 1..20: mol_type = other DNA; note = Description of Artificial Sequence: Synthetic oligonucleotide
actatatttacaactatttg

SEQ ID NO: 24409 - DNA, 20 bp, synthetic construct
  source 1..20: mol_type = other DNA; note = Description of Artificial Sequence: Synthetic oligonucleotide
cactatatttacaactattt

SEQ ID NO: 24410 - DNA, 20 bp, synthetic construct
  source 1..20: mol_type = other DNA; note = Description of Artificial Sequence: Synthetic oligonucleotide
tcactatatttacaactatt

SEQ ID NO: 24411 - DNA, 20 bp, synthetic construct
  source 1..20: mol_type = other DNA; note = Description of Artificial Sequence: Synthetic oligonucleotide
ttcactatatttacaactat

SEQ ID NO: 24412 - DNA, 20 bp, synthetic construct
  source 1..20: mol_type = other DNA; note = Description of Artificial Sequence: Synthetic oligonucleotide
cttcactatatttacaacta

SEQ ID NO: 24413 - DNA, 20 bp, synthetic construct
  source 1..20: mol_type = other DNA; note = Description of Artificial Sequence: Synthetic oligonucleotide
gcttcactatatttacaact

SEQ ID NO: 24414 - DNA, 20 bp, synthetic construct
  source 1..20: mol_type = other DNA; note = Description of Artificial Sequence: Synthetic oligonucleotide
tgcttcactatatttacaac

SEQ ID NO: 24415 - DNA, 20 bp, synthetic construct
  source 1..20: mol_type = other DNA; note = Description of Artificial Sequence: Synthetic oligonucleotide
ttgcttcactatatttacaa

SEQ ID NO: 24416 - DNA, 20 bp, synthetic construct
  source 1..20: mol_type = other DNA; note = Description of Artificial Sequence: Synthetic oligonucleotide
attgcttcactatatttaca

SEQ ID NO: 24417 - DNA, 20 bp, synthetic construct
  source 1..20: mol_type = other DNA; note = Description of Artificial Sequence: Synthetic oligonucleotide
aattgcttcactatatttac

SEQ ID NO: 24418 - DNA, 20 bp, synthetic construct
  source 1..20: mol_type = other DNA; note = Description of Artificial Sequence: Synthetic oligonucleotide
aaattgcttcactatattta

SEQ ID NO: 24419 - DNA, 20 bp, synthetic construct
  source 1..20: mol_type = other DNA; note = Description of Artificial Sequence: Synthetic oligonucleotide
caaattgcttcactatattt

SEQ ID NO: 24420 - DNA, 20 bp, synthetic construct
  source 1..20: mol_type = other DNA; note = Description of Artificial Sequence: Synthetic oligonucleotide
tcaaattgcttcactatatt

SEQ ID NO: 24421 - DNA, 20 bp, synthetic construct
  source 1..20: mol_type = other DNA; note = Description of Artificial Sequence: Synthetic oligonucleotide
ttcaaattgcttcactatat

SEQ ID NO: 24422 - DNA, 20 bp, synthetic construct
  source 1..20: mol_type = other DNA; note = Description of Artificial Sequence: Synthetic oligonucleotide
tttcaaattgcttcactata

SEQ ID NO: 24423 - DNA, 20 bp, synthetic construct
  source 1..20: mol_type = other DNA; note = Description of Artificial Sequence: Synthetic oligonucleotide
atttcaaattgcttcactat

SEQ ID NO: 24424 - DNA, 20 bp, synthetic construct
  source 1..20: mol_type = other DNA; note = Description of Artificial Sequence: Synthetic oligonucleotide
tatttcaaattgcttcacta

SEQ ID NO: 24425 - DNA, 20 bp, synthetic construct
  source 1..20: mol_type = other DNA; note = Description of Artificial Sequence: Synthetic oligonucleotide
ttatttcaaattgcttcact

SEQ ID NO: 24426 - DNA, 20 bp, synthetic construct
  source 1..20: mol_type = other DNA; note = Description of Artificial Sequence: Synthetic oligonucleotide
attatttcaaattgcttcac

SEQ ID NO: 24427 - DNA, 20 bp, synthetic construct
  source 1..20: mol_type = other DNA; note = Description of Artificial Sequence: Synthetic oligonucleotide
aattatttcaaattgcttca

SEQ ID NO: 24428 - DNA, 20 bp, synthetic construct
  source 1..20: mol_type = other DNA; note = Description of Artificial Sequence: Synthetic oligonucleotide
aaattatttcaaattgcttc

SEQ ID NO: 24429 - DNA, 20 bp, synthetic construct
  source 1..20: mol_type = other DNA; note = Description of Artificial Sequence: Synthetic oligonucleotide
aaaattatttcaaattgctt

SEQ ID NO: 24430 - DNA, 20 bp, synthetic construct
  source 1..20: mol_type = other DNA; note = Description of Artificial Sequence: Synthetic oligonucleotide
gaaaattatttcaaattgct

SEQ ID NO: 24431 - DNA, 20 bp, synthetic construct
  source 1..20: mol_type = other DNA; note = Description of Artificial Sequence: Synthetic oligonucleotide
tgaaaattatttcaaattgc

SEQ ID NO: 24432 - DNA, 20 bp, synthetic construct
  source 1..20: mol_type = other DNA; note = Description of Artificial Sequence: Synthetic oligonucleotide
ttgaaaattatttcaaattg

SEQ ID NO: 24433 - DNA, 20 bp, synthetic construct
  source 1..20: mol_type = other DNA; note = Description of Artificial Sequence: Synthetic oligonucleotide
cttgaaaattatttcaaatt

SEQ ID NO: 24434 - DNA, 20 bp, synthetic construct
  source 1..20: mol_type = other DNA; note = Description of Artificial Sequence: Synthetic oligonucleotide
gcttgaaaattatttcaaat

SEQ ID NO: 24435 - DNA, 20 bp, synthetic construct
  source 1..20: mol_type = other DNA; note = Description of Artificial Sequence: Synthetic oligonucleotide
tgcttgaaaattatttcaaa

SEQ ID NO: 24436 - DNA, 20 bp, synthetic construct
  source 1..20: mol_type = other DNA; note = Description of Artificial Sequence: Synthetic oligonucleotide
ttgcttgaaaattatttcaa

SEQ ID NO: 24437 - DNA, 20 bp, synthetic construct
  source 1..20: mol_type = other DNA; note = Description of Artificial Sequence: Synthetic oligonucleotide
tttgcttgaaaattatttca

SEQ ID NO: 24438 - DNA, 20 bp, synthetic construct
  source 1..20: mol_type = other DNA; note = Description of Artificial Sequence: Synthetic oligonucleotide
ctttgcttgaaaattatttc

SEQ ID NO: 24439 - DNA, 20 bp, synthetic construct
  source 1..20: mol_type = other DNA; note = Description of Artificial Sequence: Synthetic oligonucleotide
actttgcttgaaaattattt

SEQ ID NO: 24440 - DNA, 20 bp, synthetic construct
  source 1..20: mol_type = other DNA; note = Description of Artificial Sequence: Synthetic oligonucleotide
tactttgcttgaaaattatt

SEQ ID NO: 24441 - DNA, 20 bp, synthetic construct
  source 1..20: mol_type = other DNA; note = Description of Artificial Sequence: Synthetic oligonucleotide
atactttgcttgaaaattat

SEQ ID NO: 24442 - DNA, 20 bp, synthetic construct
  source 1..20: mol_type = other DNA; note = Description of Artificial Sequence: Synthetic oligonucleotide
aatactttgcttgaaaatta

SEQ ID NO: 24443 - DNA, 20 bp, synthetic construct
  source 1..20: mol_type = other DNA; note = Description of Artificial Sequence: Synthetic oligonucleotide
caatactttgcttgaaaatt

SEQ ID NO: 24444 - DNA, 20 bp, synthetic construct
  source 1..20: mol_type = other DNA; note = Description of Artificial Sequence: Synthetic oligonucleotide
acaatactttgcttgaaaat

SEQ ID NO: 24445 - DNA, 20 bp, synthetic construct
  source 1..20: mol_type = other DNA; note = Description of Artificial Sequence: Synthetic oligonucleotide
cacaatactttgcttgaaaa

SEQ ID NO: 24446 - DNA, 20 bp, synthetic construct
  source 1..20: mol_type = other DNA; note = Description of Artificial Sequence: Synthetic oligonucleotide
tcacaatactttgcttgaaa

SEQ ID NO: 24447 - DNA, 20 bp, synthetic construct
  source 1..20: mol_type = other DNA; note = Description of Artificial Sequence: Synthetic oligonucleotide
ttcacaatactttgcttgaa

SEQ ID NO: 24448 - DNA, 20 bp, synthetic construct
  source 1..20: mol_type = other DNA; note = Description of Artificial Sequence: Synthetic oligonucleotide
tttcacaatactttgcttga

SEQ ID NO: 24449 - DNA, 20 bp, synthetic construct
  source 1..20: mol_type = other DNA; note = Description of Artificial Sequence: Synthetic oligonucleotide
ctttcacaatactttgcttg

SEQ ID NO: 24450 - DNA, 20 bp, synthetic construct
  source 1..20: mol_type = other DNA; note = Description of Artificial Sequence: Synthetic oligonucleotide
actttcacaatactttgctt

SEQ ID NO: 24451 - DNA, 20 bp, synthetic construct
  source 1..20: mol_type = other DNA; note = Description of Artificial Sequence: Synthetic oligonucleotide
tactttcacaatactttgct

SEQ ID NO: 24452 - DNA, 20 bp, synthetic construct
  source 1..20: mol_type = other DNA; note = Description of Artificial Sequence: Synthetic oligonucleotide
atactttcacaatactttgc

SEQ ID NO: 24453 - DNA, 20 bp, synthetic construct
  source 1..20: mol_type = other DNA; note = Description of Artificial Sequence: Synthetic oligonucleotide
aatactttcacaatactttg

SEQ ID NO: 24454 - DNA, 20 bp, synthetic construct
  source 1..20: mol_type = other DNA; note = Description of Artificial Sequence: Synthetic oligonucleotide
gaatactttcacaatacttt

SEQ ID NO: 24455 - DNA, 20 bp, synthetic construct
  source 1..20: mol_type = other DNA; note = Description of Artificial Sequence: Synthetic oligonucleotide
agaatactttcacaatactt

SEQ ID NO: 24456 - DNA, 20 bp, synthetic construct
  source 1..20: mol_type = other DNA; note = Description of Artificial Sequence: Synthetic oligonucleotide
tagaatactttcacaatact

SEQ ID NO: 24457 - DNA, 20 bp, synthetic construct
  source 1..20: mol_type = other DNA; note = Description of Artificial Sequence: Synthetic oligonucleotide
ttagaatactttcacaatac

SEQ ID NO: 24458 - DNA, 20 bp, synthetic construct
  source 1..20: mol_type = other DNA; note = Description of Artificial Sequence: Synthetic oligonucleotide
cttagaatactttcacaata

SEQ ID NO: 24459 - DNA, 20 bp, synthetic construct
  source 1..20: mol_type = other DNA; note = Description of Artificial Sequence: Synthetic oligonucleotide
gcttagaatactttcacaat

SEQ ID NO: 24460 - DNA, 20 bp, synthetic construct
  source 1..20: mol_type = other DNA; note = Description of Artificial Sequence: Synthetic oligonucleotide
ggcttagaatactttcacaa

SEQ ID NO: 24461 - DNA, 20 bp, synthetic construct
  source 1..20: mol_type = other DNA; note = Description of Artificial Sequence: Synthetic oligonucleotide
tggcttagaatactttcaca

SEQ ID NO: 24462 - DNA, 20 bp, synthetic construct
  source 1..20: mol_type = other DNA; note = Description of Artificial Sequence: Synthetic oligonucleotide
ttggcttagaatactttcac

SEQ ID NO: 24463 - DNA, 20 bp, synthetic construct
  source 1..20: mol_type = other DNA; note = Description of Artificial Sequence: Synthetic oligonucleotide
cttggcttagaatactttca

SEQ ID NO: 24464 - DNA, 20 bp, synthetic construct
  source 1..20: mol_type = other DNA; note = Description of Artificial Sequence: Synthetic oligonucleotide
acttggcttagaatactttc

SEQ ID NO: 24465 - DNA, 20 bp, synthetic construct
  source 1..20: mol_type = other DNA; note = Description of Artificial Sequence: Synthetic oligonucleotide
aacttggcttagaatacttt

SEQ ID NO: 24466 - DNA, 20 bp, synthetic construct
  source 1..20: mol_type = other DNA; note = Description of Artificial Sequence: Synthetic oligonucleotide
aaacttggcttagaatactt

SEQ ID NO: 24467 - DNA, 20 bp, synthetic construct
  source 1..20: mol_type = other DNA; note = Description of Artificial Sequence: Synthetic oligonucleotide
aaaacttggcttagaatact

SEQ ID NO: 24468 - DNA, 20 bp, synthetic construct
  source 1..20: mol_type = other DNA; note = Description of Artificial Sequence: Synthetic oligonucleotide
taaaacttggcttagaatac

SEQ ID NO: 24469 - DNA, 20 bp, synthetic construct
  source 1..20: mol_type = other DNA; note = Description of Artificial Sequence: Synthetic oligonucleotide
ttaaaacttggcttagaata

SEQ ID NO: 24470 - DNA, 20 bp, synthetic construct
  source 1..20: mol_type = other DNA; note = Description of Artificial Sequence: Synthetic oligonucleotide
tttaaaacttggcttagaat

SEQ ID NO: 24471 - DNA, 20 bp, synthetic construct
  source 1..20: mol_type = other DNA; note = Description of Artificial Sequence: Synthetic oligonucleotide
atttaaaacttggcttagaa

SEQ ID NO: 24472 - DNA, 20 bp, synthetic construct
  source 1..20: mol_type = other DNA; note = Description of Artificial Sequence: Synthetic oligonucleotide
tatttaaaacttggcttaga

SEQ ID NO: 24473 - DNA, 20 bp, synthetic construct
  source 1..20: mol_type = other DNA; note = Description of Artificial Sequence: Synthetic oligonucleotide
atatttaaaacttggcttag

SEQ ID NO: 24474 - DNA, 20 bp, synthetic construct
  source 1..20: mol_type = other DNA; note = Description of Artificial Sequence: Synthetic oligonucleotide
aatatttaaaacttggctta

SEQ ID NO: 24475 - DNA, 20 bp, synthetic construct
  source 1..20: mol_type = other DNA; note = Description of Artificial Sequence: Synthetic oligonucleotide
taatatttaaaacttggctt

SEQ ID NO: 24476 - DNA, 20 bp, synthetic construct
  source 1..20: mol_type = other DNA; note = Description of Artificial Sequence: Synthetic oligonucleotide
ataatatttaaaacttggct

SEQ ID NO: 24477 - DNA, 20 bp, synthetic construct
  source 1..20: mol_type = other DNA; note = Description of Artificial Sequence: Synthetic oligonucleotide
gataatatttaaaacttggc

SEQ ID NO: 24478 - DNA, 20 bp, synthetic construct
  source 1..20: mol_type = other DNA; note = Description of Artificial Sequence: Synthetic oligonucleotide
agataatatttaaaacttgg

SEQ ID NO: 24479 - DNA, 20 bp, synthetic construct
  source 1..20: mol_type = other DNA; note = Description of Artificial Sequence: Synthetic oligonucleotide
tagataatatttaaaacttg

SEQ ID NO: 24480 - DNA, 20 bp, synthetic construct
  source 1..20: mol_type = other DNA; note = Description of Artificial Sequence: Synthetic oligonucleotide
ttagataatatttaaaactt

SEQ ID NO: 24481 - DNA, 20 bp, synthetic construct
  source 1..20: mol_type = other DNA; note = Description of Artificial Sequence: Synthetic oligonucleotide
gttagataatatttaaaact

SEQ ID NO: 24482 - DNA, 20 bp, synthetic construct
  source 1..20: mol_type = other DNA; note = Description of Artificial Sequence: Synthetic oligonucleotide
tgttagataatatttaaaac

SEQ ID NO: 24483 - DNA, 20 bp, synthetic construct
  source 1..20: mol_type = other DNA; note = Description of Artificial Sequence: Synthetic oligonucleotide
ctgttagataatatttaaaa

SEQ ID NO: 24484 - DNA, 20 bp, synthetic construct
  source 1..20: mol_type = other DNA; note = Description of Artificial Sequence: Synthetic oligonucleotide
tctgttagataatatttaaa

SEQ ID NO: 24485 - DNA, 20 bp, synthetic construct
  source 1..20: mol_type = other DNA; note = Description of Artificial Sequence: Synthetic oligonucleotide
gtctgttagataatatttaa

SEQ ID NO: 24486 - DNA, 20 bp, synthetic construct
  source 1..20: mol_type = other DNA; note = Description of Artificial Sequence: Synthetic oligonucleotide
tgtctgttagataatattta

SEQ ID NO: 24487 - DNA, 20 bp, synthetic construct
  source 1..20: mol_type = other DNA; note = Description of Artificial Sequence: Synthetic oligonucleotide
ttgtctgttagataatattt

SEQ ID NO: 24488 - DNA, 20 bp, synthetic construct
  source 1..20: mol_type = other DNA; note = Description of Artificial Sequence: Synthetic oligonucleotide
cttgtctgttagataatatt

SEQ ID NO: 24489 - DNA, 20 bp, synthetic construct
  source 1..20: mol_type = other DNA; note = Description of Artificial Sequence: Synthetic oligonucleotide
tcttgtctgttagataatat

SEQ ID NO: 24490 - DNA, 20 bp, synthetic construct
  source 1..20: mol_type = other DNA; note = Description of Artificial Sequence: Synthetic oligonucleotide
ctcttgtctgttagataata

SEQ ID NO: 24491 - DNA, 20 bp, synthetic construct
  source 1..20: mol_type = other DNA; note = Description of Artificial Sequence: Synthetic oligonucleotide
actcttgtctgttagataat

SEQ ID NO: 24492 - DNA, 20 bp, synthetic construct
  source 1..20: mol_type = other DNA; note = Description of Artificial Sequence: Synthetic oligonucleotide
cactcttgtctgttagataa

SEQ ID NO: 24493 - DNA, 20 bp, synthetic construct
  source 1..20: mol_type = other DNA; note = Description of Artificial Sequence: Synthetic oligonucleotide
ccactcttgtctgttagata

SEQ ID NO: 24494 - DNA, 20 bp, synthetic construct
  source 1..20: mol_type = other DNA; note = Description of Artificial Sequence: Synthetic oligonucleotide
accactcttgtctgttagat

SEQ ID NO: 24495 - DNA, 20 bp, synthetic construct
  source 1..20: mol_type = other DNA; note = Description of Artificial Sequence: Synthetic oligonucleotide
taccactcttgtctgttaga

SEQ ID NO: 24496 - DNA, 20 bp, synthetic construct
  source 1..20: mol_type = other DNA; note = Description of Artificial Sequence: Synthetic oligonucleotide
ataccactcttgtctgttag

SEQ ID NO: 24497 - DNA, 20 bp, synthetic construct
  source 1..20: mol_type = other DNA; note = Description of Artificial Sequence: Synthetic oligonucleotide
tataccactcttgtctgtta

SEQ ID NO: 24498 - DNA, 20 bp, synthetic construct
  source 1..20: mol_type = other DNA; note = Description of Artificial Sequence: Synthetic oligonucleotide
atataccactcttgtctgtt

SEQ ID NO: 24499 - DNA, 20 bp, synthetic construct
  source 1..20: mol_type = other DNA; note = Description of Artificial Sequence: Synthetic oligonucleotide
tatataccactcttgtctgt

SEQ ID NO: 24500 - DNA, 20 bp, synthetic construct
  source 1..20: mol_type = other DNA; note = Description of Artificial Sequence: Synthetic oligonucleotide
gtatataccactcttgtctg

SEQ ID NO: 24501 - DNA, 20 bp, synthetic construct
  source 1..20: mol_type = other DNA; note = Description of Artificial Sequence: Synthetic oligonucleotide
tgtatataccactcttgtct

SEQ ID NO: 24502 - DNA, 20 bp, synthetic construct
  source 1..20: mol_type = other DNA; note = Description of Artificial Sequence: Synthetic oligonucleotide
ttgtatataccactcttgtc

SEQ ID NO: 24503 - DNA, 20 bp, synthetic construct
  source 1..20: mol_type = other DNA; note = Description of Artificial Sequence: Synthetic oligonucleotide
cttgtatataccactcttgt

SEQ ID NO: 24504 - DNA, 20 bp, synthetic construct
  source 1..20: mol_type = other DNA; note = Description of Artificial Sequence: Synthetic oligonucleotide
acttgtatataccactcttg

SEQ ID NO: 24505 - DNA, 20 bp, synthetic construct
  source 1..20: mol_type = other DNA; note = Description of Artificial Sequence: Synthetic oligonucleotide
tacttgtatataccactctt

SEQ ID NO: 24506 - DNA, 20 bp, synthetic construct
  source 1..20: mol_type = other DNA; note = Description of Artificial Sequence: Synthetic oligonucleotide
ctacttgtatataccactct

SEQ ID NO: 24507 - DNA, 20 bp, synthetic construct
  source 1..20: mol_type = other DNA; note = Description of Artificial Sequence: Synthetic oligonucleotide
tctacttgtatataccactc

SEQ ID NO: 24508 - DNA, 20 bp, synthetic construct
  source 1..20: mol_type = other DNA; note = Description of Artificial Sequence: Synthetic oligonucleotide
atctacttgtatataccact

SEQ ID NO: 24509 - DNA, 20 bp, synthetic construct
  source 1..20: mol_type = other DNA; note = Description of Artificial Sequence: Synthetic oligonucleotide
gatctacttgtatataccac

SEQ ID NO: 24510 - DNA, 20 bp, synthetic construct
  source 1..20: mol_type = other DNA; note = Description of Artificial Sequence: Synthetic oligonucleotide
ggatctacttgtatatacca

SEQ ID NO: 24511 - DNA, 20 bp, synthetic construct
  source 1..20: mol_type = other DNA; note = Description of Artificial Sequence: Synthetic oligonucleotide
aggatctacttgtatatacc

SEQ ID NO: 24512 - DNA, 20 bp, synthetic construct
  source 1..20: mol_type = other DNA; note = Description of Artificial Sequence: Synthetic oligonucleotide
caggatctacttgtatatac

SEQ ID NO: 24513 - DNA, 20 bp, synthetic construct
  source 1..20: mol_type = other DNA; note = Description of Artificial Sequence: Synthetic oligonucleotide
tcaggatctacttgtatata

SEQ ID NO: 24514 - DNA, 20 bp, synthetic construct
  source 1..20: mol_type = other DNA; note = Description of Artificial Sequence: Synthetic oligonucleotide
ctcaggatctacttgtatat

SEQ ID NO: 24515 - DNA, 20 bp, synthetic construct
  source 1..20: mol_type = other DNA; note = Description of Artificial Sequence: Synthetic oligonucleotide
tctcaggatctacttgtata

SEQ ID NO: 24516 - DNA, 20 bp, synthetic construct
  source 1..20: mol_type = other DNA; note = Description of Artificial Sequence: Synthetic oligonucleotide
ttctcaggatctacttgtat

SEQ ID NO: 24517 - DNA, 20 bp, synthetic construct
  source 1..20: mol_type = other DNA; note = Description of Artificial Sequence: Synthetic oligonucleotide
cttctcaggatctacttgta

SEQ ID NO: 24518 - DNA, 20 bp, synthetic construct
  source 1..20: mol_type = other DNA; note = Description of Artificial Sequence: Synthetic oligonucleotide
acttctcaggatctacttgt

SEQ ID NO: 24519 - DNA, 20 bp, synthetic construct
  source 1..20: mol_type = other DNA; note = Description of Artificial Sequence: Synthetic oligonucleotide
tacttctcaggatctacttg

SEQ ID NO: 24520 - DNA, 20 bp, synthetic construct
  source 1..20: mol_type = other DNA; note = Description of Artificial Sequence: Synthetic oligonucleotide
gtacttctcaggatctactt

SEQ ID NO: 24521 - DNA, 20 bp, synthetic construct
  source 1..20: mol_type = other DNA; note = Description of Artificial Sequence: Synthetic oligonucleotide
ggtacttctcaggatctact

SEQ ID NO: 24522 - DNA, 20 bp, synthetic construct
  source 1..20: mol_type = other DNA; note = Description of Artificial Sequence: Synthetic oligonucleotide
aggtacttctcaggatctac

SEQ ID NO: 24523 - DNA, 20 bp, synthetic construct
  source 1..20: mol_type = other DNA; note = Description of Artificial Sequence: Synthetic oligonucleotide
aaggtacttctcaggatcta

SEQ ID NO: 24524 - DNA, 20 bp, synthetic construct
  source 1..20: mol_type = other DNA; note = Description of Artificial Sequence: Synthetic oligonucleotide
aaaggtacttctcaggatct

SEQ ID NO: 24525 - DNA, 20 bp, synthetic construct
  source 1..20: mol_type = other DNA; note = Description of Artificial Sequence: Synthetic oligonucleotide
caaaggtacttctcaggatc

SEQ ID NO: 24526 - DNA, 20 bp, synthetic construct
  source 1..20: mol_type = other DNA; note = Description of Artificial Sequence: Synthetic oligonucleotide
acaaaggtacttctcaggat

SEQ ID NO: 24527 - DNA, 20 bp, synthetic construct
  source 1..20: mol_type = other DNA; note = Description of Artificial Sequence: Synthetic oligonucleotide
aacaaaggtacttctcagga

SEQ ID NO: 24528 - DNA, 20 bp, synthetic construct
  source 1..20: mol_type = other DNA; note = Description of Artificial Sequence: Synthetic oligonucleotide
taacaaaggtacttctcagg

SEQ ID NO: 24529 - DNA, 20 bp, synthetic construct
  source 1..20: mol_type = other DNA; note = Description of Artificial Sequence: Synthetic oligonucleotide
gtaacaaaggtacttctcag

SEQ ID NO: 24530 - DNA, 20 bp, synthetic construct
  source 1..20: mol_type = other DNA; note = Description of Artificial Sequence: Synthetic oligonucleotide
tgtaacaaaggtacttctca

SEQ ID NO: 24531 - DNA, 20 bp, synthetic construct
  source 1..20: mol_type = other DNA; note = Description of Artificial Sequence: Synthetic oligonucleotide
ctgtaacaaaggtacttctc

SEQ ID NO: 24532 - DNA, 20 bp, synthetic construct
  source 1..20: mol_type = other DNA; note = Description of Artificial Sequence: Synthetic oligonucleotide
gctgtaacaaaggtacttct

SEQ ID NO: 24533 - DNA, 20 bp, synthetic construct
  source 1..20: mol_type = other DNA; note = Description of Artificial Sequence: Synthetic oligonucleotide
agctgtaacaaaggtacttc

SEQ ID NO: 24534 - DNA, 20 bp, synthetic construct
  source 1..20: mol_type = other DNA; note = Description of Artificial Sequence: Synthetic oligonucleotide
tagctgtaacaaaggtactt

SEQ ID NO: 24535 - DNA, 20 bp, synthetic construct
  source 1..20: mol_type = other DNA; note = Description of Artificial Sequence: Synthetic oligonucleotide
gtagctgtaacaaaggtact

SEQ ID NO: 24536 - DNA, 20 bp, synthetic construct
  source 1..20: mol_type = other DNA; note = Description of Artificial Sequence: Synthetic oligonucleotide
agtagctgtaacaaaggtac

SEQ ID NO: 24537 - DNA, 20 bp, synthetic construct
  source 1..20: mol_type = other DNA; note = Description of Artificial Sequence: Synthetic oligonucleotide
tagtagctgtaacaaaggta

SEQ ID NO: 24538 - DNA, 20 bp, synthetic construct
  source 1..20: mol_type = other DNA; note = Description of Artificial Sequence: Synthetic oligonucleotide
atagtagctgtaacaaaggt

SEQ ID NO: 24539 - DNA, 20 bp, synthetic construct
  source 1..20: mol_type = other DNA; note = Description of Artificial Sequence: Synthetic oligonucleotide
tatagtagctgtaacaaagg

SEQ ID NO: 24540 - DNA, 20 bp, synthetic construct
  source 1..20: mol_type = other DNA; note = Description of Artificial Sequence: Synthetic oligonucleotide
ttatagtagctgtaacaaag

SEQ ID NO: 24541 - DNA, 20 bp, synthetic construct
  source 1..20: mol_type = other DNA; note = Description of Artificial Sequence: Synthetic oligonucleotide
tttatagtagctgtaacaaa

SEQ ID NO: 24542 - DNA, 20 bp, synthetic construct
  source 1..20: mol_type = other DNA; note = Description of Artificial Sequence: Synthetic oligonucleotide
atttatagtagctgtaacaa

SEQ ID NO: 24543 - DNA, 20 bp, synthetic construct
  source 1..20: mol_type = other DNA; note = Description of Artificial Sequence: Synthetic oligonucleotide
tatttatagtagctgtaaca

SEQ ID NO: 24544 - DNA, 20 bp, synthetic construct
  source 1..20: mol_type = other DNA; note = Description of Artificial Sequence: Synthetic oligonucleotide
atatttatagtagctgtaac

SEQ ID NO: 24545 - DNA, 20 bp, synthetic construct
  source 1..20: mol_type = other DNA; note = Description of Artificial Sequence: Synthetic oligonucleotide
tatatttatagtagctgtaa

SEQ ID NO: 24546 - DNA, 20 bp, synthetic construct
  source 1..20: mol_type = other DNA; note = Description of Artificial Sequence: Synthetic oligonucleotide
gtatatttatagtagctgta

SEQ ID NO: 24547 - DNA, 20 bp, synthetic construct
  source 1..20: mol_type = other DNA; note = Description of Artificial Sequence: Synthetic oligonucleotide
tgtatatttatagtagctgt

SEQ ID NO: 24548 - DNA, 20 bp, synthetic construct
  source 1..20: mol_type = other DNA; note = Description of Artificial Sequence: Synthetic oligonucleotide
atgtatatttatagtagctg

SEQ ID NO: 24549 - DNA, 20 bp, synthetic construct
  source 1..20: mol_type = other DNA; note = Description of Artificial Sequence: Synthetic oligonucleotide
tatgtatatttatagtagct

SEQ ID NO: 24550 - DNA, 20 bp, synthetic construct
  source 1..20: mol_type = other DNA; note = Description of Artificial Sequence: Synthetic oligonucleotide
atatgtatatttatagtagc

SEQ ID NO: 24551 - DNA, 20 bp, synthetic construct
  source 1..20: mol_type = other DNA; note = Description of Artificial Sequence: Synthetic oligonucleotide
tatatgtatatttatagtag

SEQ ID NO: 24552 - DNA, 20 bp, synthetic construct
  source 1..20: mol_type = other DNA; note = Description of Artificial Sequence: Synthetic oligonucleotide
ttatatgtatatttatagta

SEQ ID NO: 24553 - DNA, 20 bp, synthetic construct
  source 1..20: mol_type = other DNA; note = Description of Artificial Sequence: Synthetic oligonucleotide
tttatatgtatatttatagt

SEQ ID NO: 24554 - DNA, 20 bp, synthetic construct
  source 1..20: mol_type = other DNA; note = Description of Artificial Sequence: Synthetic oligonucleotide
atttatatgtatatttatag

SEQ ID NO: 24555 - DNA, 20 bp, synthetic construct
  source 1..20: mol_type = other DNA; note = Description of Artificial Sequence: Synthetic oligonucleotide
aatttatatgtatatttata

SEQ ID NO: 24556 - DNA, 20 bp, synthetic construct
  source 1..20: mol_type = other DNA; note = Description of Artificial Sequence: Synthetic oligonucleotide
taatttatatgtatatttat

SEQ ID NO: 24557 - DNA, 20 bp, synthetic construct
  source 1..20: mol_type = other DNA; note = Description of Artificial Sequence: Synthetic oligonucleotide
ataatttatatgtatattta

SEQ ID NO: 24558 - DNA, 20 bp, synthetic construct
  source 1..20: mol_type = other DNA; note = Description of Artificial Sequence: Synthetic oligonucleotide
tataatttatatgtatattt

SEQ ID NO: 24559 - DNA, 20 bp, synthetic construct
  source 1..20: mol_type = other DNA; note = Description of Artificial Sequence: Synthetic oligonucleotide
ctataatttatatgtatatt

SEQ ID NO: 24560 - DNA, 20 bp, synthetic construct
  source 1..20: mol_type = other DNA; note = Description of Artificial Sequence: Synthetic oligonucleotide
tctataatttatatgtatat

SEQ ID NO: 24561 - DNA, 20 bp, synthetic construct
  source 1..20: mol_type = other DNA; note = Description of Artificial Sequence: Synthetic oligonucleotide
ttctataatttatatgtata

SEQ ID NO: 24562 - DNA, 20 bp, synthetic construct
  source 1..20: mol_type = other DNA; note = Description of Artificial Sequence: Synthetic oligonucleotide
attctataatttatatgtat

SEQ ID NO: 24563 - DNA, 20 bp, synthetic construct
  source 1..20: mol_type = other DNA; note = Description of Artificial Sequence: Synthetic oligonucleotide
gattctataatttatatgta

SEQ ID NO: 24564 - DNA, 20 bp, synthetic construct
  source 1..20: mol_type = other DNA; note = Description of Artificial Sequence: Synthetic oligonucleotide
agattctataatttatatgt

SEQ ID NO: 24565 - DNA, 20 bp, synthetic construct
  source 1..20: mol_type = other DNA; note = Description of Artificial Sequence: Synthetic oligonucleotide
tagattctataatttatatg

SEQ ID NO: 24566 - DNA, 20 bp, synthetic construct
  source 1..20: mol_type = other DNA; note = Description of Artificial Sequence: Synthetic oligonucleotide
gtagattctataatttatat

SEQ ID NO: 24567 - DNA, 20 bp, synthetic construct
  source 1..20: mol_type = other DNA; note = Description of Artificial Sequence: Synthetic oligonucleotide
agtagattctataatttata

SEQ ID NO: 24568 - DNA, 20 bp, synthetic construct
  source 1..20: mol_type = other DNA; note = Description of Artificial Sequence: Synthetic oligonucleotide
aagtagattctataatttat

SEQ ID NO: 24569 - DNA, 20 bp, synthetic construct
  source 1..20: mol_type = other DNA; note = Description of Artificial Sequence: Synthetic oligonucleotide
aaagtagattctataattta

SEQ ID NO: 24570 - DNA, 20 bp, synthetic construct
  source 1..20: mol_type = other DNA; note = Description of Artificial Sequence: Synthetic oligonucleotide
taaagtagattctataattt

SEQ ID NO: 24571 - DNA, 20 bp, synthetic construct
  source 1..20: mol_type = other DNA; note = Description of Artificial Sequence: Synthetic oligonucleotide
ttaaagtagattctataatt

SEQ ID NO: 24572 - DNA, 20 bp, synthetic construct
  source 1..20: mol_type = other DNA; note = Description of Artificial Sequence: Synthetic oligonucleotide
attaaagtagattctataat

SEQ ID NO: 24573 - DNA, 20 bp, synthetic construct
  source 1..20: mol_type = other DNA; note = Description of Artificial Sequence: Synthetic oligonucleotide
aattaaagtagattctataa

SEQ ID NO: 24574 - DNA, 20 bp, synthetic construct
  source 1..20: mol_type = other DNA; note = Description of Artificial Sequence: Synthetic oligonucleotide
aaattaaagtagattctata

SEQ ID NO: 24575 - DNA, 20 bp, synthetic construct
  source 1..20: mol_type = other DNA; note = Description of Artificial Sequence: Synthetic oligonucleotide
taaattaaagtagattctat

SEQ ID NO: 24576 - DNA, 20 bp, synthetic construct
  source 1..20: mol_type = other DNA; note = Description of Artificial Sequence: Synthetic oligonucleotide
ataaattaaagtagattcta

SEQ ID NO: 24577 - DNA, 20 bp, synthetic construct
  source 1..20: mol_type = other DNA; note = Description of Artificial Sequence: Synthetic oligonucleotide
aataaattaaagtagattct

SEQ ID NO: 24578 - DNA, 20 bp, synthetic construct
  source 1..20: mol_type = other DNA; note = Description of Artificial Sequence: Synthetic oligonucleotide
aaataaattaaagtagattc

SEQ ID NO: 24579 - DNA, 20 bp, synthetic construct
  source 1..20: mol_type = other DNA; note = Description of Artificial Sequence: Synthetic oligonucleotide
aaaataaattaaagtagatt

SEQ ID NO: 24580 - DNA, 20 bp, synthetic construct
  source 1..20: mol_type = other DNA; note = Description of Artificial Sequence: Synthetic oligonucleotide
caaaataaattaaagtagat

SEQ ID NO: 24581 - DNA, 20 bp, synthetic construct
  source 1..20: mol_type = other DNA; note = Description of Artificial Sequence: Synthetic oligonucleotide
acaaaataaattaaagtaga

SEQ ID NO: 24582 - DNA, 20 bp, synthetic construct
  source 1..20: mol_type = other DNA; note = Description of Artificial Sequence: Synthetic oligonucleotide
cacaaaataaattaaagtag

SEQ ID NO: 24583 - DNA, 20 bp, synthetic construct
  source 1..20: mol_type = other DNA; note = Description of Artificial Sequence: Synthetic oligonucleotide
tcacaaaataaattaaagta

SEQ ID NO: 24584 - DNA, 20 bp, synthetic construct
  source 1..20: mol_type = other DNA; note = Description of Artificial Sequence: Synthetic oligonucleotide
ttcacaaaataaattaaagt

SEQ ID NO: 24585 - DNA, 20 bp, synthetic construct
  source 1..20: mol_type = other DNA; note = Description of Artificial Sequence: Synthetic oligonucleotide
gttcacaaaataaattaaag

SEQ ID NO: 24586 - DNA, 20 bp, synthetic construct
  source 1..20: mol_type = other DNA; note = Description of Artificial Sequence: Synthetic oligonucleotide
tgttcacaaaataaattaaa

SEQ ID NO: 24587 - DNA, 20 bp, synthetic construct
  source 1..20: mol_type = other DNA; note = Description of Artificial Sequence: Synthetic oligonucleotide
gtgttcacaaaataaattaa

SEQ ID NO: 24588 - DNA, 20 bp, synthetic construct
  source 1..20: mol_type = other DNA; note = Description of Artificial Sequence: Synthetic oligonucleotide
agtgttcacaaaataaatta

SEQ ID NO: 24589 - DNA, 20 bp, synthetic construct
  source 1..20: mol_type = other DNA; note = Description of Artificial Sequence: Synthetic oligonucleotide
aagtgttcacaaaataaatt

SEQ ID NO: 24590 - DNA, 20 bp, synthetic construct
  source 1..20: mol_type = other DNA; note = Description of Artificial Sequence: Synthetic oligonucleotide
aaagtgttcacaaaataaat

SEQ ID NO: 24591 - DNA, 20 bp, synthetic construct
  source 1..20: mol_type = other DNA; note = Description of Artificial Sequence: Synthetic oligonucleotide
aaaagtgttcacaaaataaa

SEQ ID NO: 24592 - DNA, 20 bp, synthetic construct
  source 1..20: mol_type = other DNA; note = Description of Artificial Sequence: Synthetic oligonucleotide
caaaagtgttcacaaaataa

SEQ ID NO: 24593 - DNA, 20 bp, synthetic construct
  source 1..20: mol_type = other DNA; note = Description of Artificial Sequence: Synthetic oligonucleotide
tcaaaagtgttcacaaaata

SEQ ID NO: 24594 - DNA, 20 bp, synthetic construct
  source 1..20: mol_type = other DNA; note = Description of Artificial Sequence: Synthetic oligonucleotide
ttcaaaagtgttcacaaaat

SEQ ID NO: 24595 - DNA, 20 bp, synthetic construct
  source 1..20: mol_type = other DNA; note = Description of Artificial Sequence: Synthetic oligonucleotide
tttcaaaagtgttcacaaaa

SEQ ID NO: 24596 - DNA, 20 bp, synthetic construct
  source 1..20: mol_type = other DNA; note = Description of Artificial Sequence: Synthetic oligonucleotide
ttttcaaaagtgttcacaaa

SEQ ID NO: 24597 - DNA, 20 bp, synthetic construct
  source 1..20: mol_type = other DNA; note = Description of Artificial Sequence: Synthetic oligonucleotide
attttcaaaagtgttcacaa

SEQ ID NO: 24598 - DNA, 20 bp, synthetic construct
  source 1..20: mol_type = other DNA; note = Description of Artificial Sequence: Synthetic oligonucleotide
cattttcaaaagtgttcaca

SEQ ID NO: 24599 - DNA, 20 bp, synthetic construct
  source 1..20: mol_type = other DNA; note = Description of Artificial Sequence: Synthetic oligonucleotide
acattttcaaaagtgttcac

SEQ ID NO: 24600 - DNA, 20 bp, synthetic construct
  source 1..20: mol_type = other DNA; note = Description of Artificial Sequence: Synthetic oligonucleotide
tacattttcaaaagtgttca

SEQ ID NO: 24601 - DNA, 20 bp, synthetic construct
  source 1..20: mol_type = other DNA; note = Description of Artificial Sequence: Synthetic oligonucleotide
gtacattttcaaaagtgttc

SEQ ID NO: 24602 - DNA, 20 bp, synthetic construct
  source 1..20: mol_type = other DNA; note = Description of Artificial Sequence: Synthetic oligonucleotide
tgtacattttcaaaagtgtt

SEQ ID NO: 24603 - DNA, 20 bp, synthetic construct
  source 1..20: mol_type = other DNA; note = Description of Artificial Sequence: Synthetic oligonucleotide
atgtacattttcaaaagtgt

SEQ ID NO: 24604 - DNA, 20 bp, synthetic construct
  source 1..20: mol_type = other DNA; note = Description of Artificial Sequence: Synthetic oligonucleotide
catgtacattttcaaaagtg

SEQ ID NO: 24605 - DNA, 20 bp, synthetic construct
  source 1..20: mol_type = other DNA; note = Description of Artificial Sequence: Synthetic oligonucleotide
acatgtacattttcaaaagt

SEQ ID NO: 24606 - DNA, 20 bp, synthetic construct
  source 1..20: mol_type = other DNA; note = Description of Artificial Sequence: Synthetic oligonucleotide
aacatgtacattttcaaaag

SEQ ID NO: 24607 - DNA, 20 bp, synthetic construct
  source 1..20: mol_type = other DNA; note = Description of Artificial Sequence: Synthetic oligonucleotide
gaacatgtacattttcaaaa

SEQ ID NO: 24608 - DNA, 20 bp, synthetic construct
  source 1..20: mol_type = other DNA; note = Description of Artificial Sequence: Synthetic oligonucleotide
ggaacatgtacattttcaaa

SEQ ID NO: 24609 - DNA, 20 bp, synthetic construct
  source 1..20: mol_type = other DNA; note = Description of Artificial Sequence: Synthetic oligonucleotide
aggaacatgtacattttcaa

SEQ ID NO: 24610 - DNA, 20 bp, synthetic construct
  source 1..20: mol_type = other DNA; note = Description of Artificial Sequence: Synthetic oligonucleotide
aaggaacatgtacattttca

SEQ ID NO: 24611 - DNA, 20 bp, synthetic construct
  source 1..20: mol_type = other DNA; note = Description of Artificial Sequence: Synthetic oligonucleotide
aaaggaacatgtacattttc

SEQ ID NO: 24612 - DNA, 20 bp, synthetic construct
  source 1..20: mol_type = other DNA; note = Description of Artificial Sequence: Synthetic oligonucleotide
caaaggaacatgtacatttt

SEQ ID NO: 24613 - DNA, 20 bp, synthetic construct
  source 1..20: mol_type = other DNA; note = Description of Artificial Sequence: Synthetic oligonucleotide
acaaaggaacatgtacattt

SEQ ID NO: 24614 - DNA, 20 bp, synthetic construct
  source 1..20: mol_type = other DNA; note = Description of Artificial Sequence: Synthetic oligonucleotide
tacaaaggaacatgtacatt

SEQ ID NO: 24615 - DNA, 20 bp, synthetic construct
  source 1..20: mol_type = other DNA; note = Description of Artificial Sequence: Synthetic oligonucleotide
ttacaaaggaacatgtacat

SEQ ID NO: 24616 - DNA, 20 bp, synthetic construct
  source 1..20: mol_type = other DNA; note = Description of Artificial Sequence: Synthetic oligonucleotide
attacaaaggaacatgtaca

SEQ ID NO: 24617 - DNA, 20 bp, synthetic construct
  source 1..20: mol_type = other DNA; note = Description of Artificial Sequence: Synthetic oligonucleotide
aattacaaaggaacatgtac

SEQ ID NO: 24618 - DNA, 20 bp, synthetic construct
  source 1..20: mol_type = other DNA; note = Description of Artificial Sequence: Synthetic oligonucleotide
caattacaaaggaacatgta

SEQ ID NO: 24619 - DNA, 20 bp, synthetic construct
  source 1..20: mol_type = other DNA; note = Description of Artificial Sequence: Synthetic oligonucleotide
tcaattacaaaggaacatgt

SEQ ID NO: 24620 - DNA, 20 bp, synthetic construct
  source 1..20: mol_type = other DNA; note = Description of Artificial Sequence: Synthetic oligonucleotide
gtcaattacaaaggaacatg

SEQ ID NO: 24621 - DNA, 20 bp, synthetic construct
  source 1..20: mol_type = other DNA; note = Description of Artificial Sequence: Synthetic oligonucleotide
tgtcaattacaaaggaacat

SEQ ID NO: 24622 - DNA, 20 bp, synthetic construct
  source 1..20: mol_type = other DNA; note = Description of Artificial Sequence: Synthetic oligonucleotide
gtgtcaattacaaaggaaca

SEQ ID NO: 24623 - DNA, 20 bp, synthetic construct
  source 1..20: mol_type = other DNA; note = Description of Artificial Sequence: Synthetic oligonucleotide
agtgtcaattacaaaggaac

SEQ ID NO: 24624 - DNA, 20 bp, synthetic construct
  source 1..20: mol_type = other DNA; note = Description of Artificial Sequence: Synthetic oligonucleotide
tagtgtcaattacaaaggaa

SEQ ID NO: 24625 - DNA, 20 bp, synthetic construct
  source 1..20: mol_type = other DNA; note = Description of Artificial Sequence: Synthetic oligonucleotide
atagtgtcaattacaaagga

SEQ ID NO: 24626 - DNA, 20 bp, synthetic construct
  source 1..20: mol_type = other DNA; note = Description of Artificial Sequence: Synthetic oligonucleotide
tatagtgtcaattacaaagg

SEQ ID NO: 24627 - DNA, 20 bp, synthetic construct
  source 1..20: mol_type = other DNA; note = Description of Artificial Sequence: Synthetic oligonucleotide
atatagtgtcaattacaaag

SEQ ID NO: 24628 - DNA, 20 bp, synthetic construct
  source 1..20: mol_type = other DNA; note = Description of Artificial Sequence: Synthetic oligonucleotide
tatatagtgtcaattacaaa

SEQ ID NO: 24629 - DNA, 20 bp, synthetic construct
  source 1..20: mol_type = other DNA; note = Description of Artificial Sequence: Synthetic oligonucleotide
atatatagtgtcaattacaa

SEQ ID NO: 24630 - DNA, 20 bp, synthetic construct
  source 1..20: mol_type = other DNA; note = Description of Artificial Sequence: Synthetic oligonucleotide
aatatatagtgtcaattaca

SEQ ID NO: 24631 - DNA, 20 bp, synthetic construct
  source 1..20: mol_type = other DNA; note = Description of Artificial Sequence: Synthetic oligonucleotide
aaatatatagtgtcaattac

SEQ ID NO: 24632 - DNA, 20 bp, synthetic construct
  source 1..20: mol_type = other DNA; note = Description of Artificial Sequence: Synthetic oligonucleotide
gaaatatatagtgtcaatta

SEQ ID NO: 24633 - DNA, 20 bp, synthetic construct
  source 1..20: mol_type = other DNA; note = Description of Artificial Sequence: Synthetic oligonucleotide
agaaatatatagtgtcaatt

SEQ ID NO: 24634 - DNA, 20 bp, synthetic construct
  source 1..20: mol_type = other DNA; note = Description of Artificial Sequence: Synthetic oligonucleotide
aagaaatatatagtgtcaat

SEQ ID NO: 24635 - DNA, 20 bp, synthetic construct
  source 1..20: mol_type = other DNA; note = Description of Artificial Sequence: Synthetic oligonucleotide
taagaaatatatagtgtcaa

SEQ ID NO: 24636 - DNA, 20 bp, synthetic construct
  source 1..20: mol_type = other DNA; note = Description of Artificial Sequence: Synthetic oligonucleotide
ttaagaaatatatagtgtca

SEQ ID NO: 24637 - DNA, 20 bp, synthetic construct
  source 1..20: mol_type = other DNA; note = Description of Artificial Sequence: Synthetic oligonucleotide
attaagaaatatatagtgtc

SEQ ID NO: 24638 - DNA, 20 bp, synthetic construct
  source 1..20: mol_type = other DNA; note = Description of Artificial Sequence: Synthetic oligonucleotide
tattaagaaatatatagtgt

SEQ ID NO: 24639 - DNA, 20 bp, synthetic construct
  source 1..20: mol_type = other DNA; note = Description of Artificial Sequence: Synthetic oligonucleotide
ttattaagaaatatatagtg

SEQ ID NO: 24640 - DNA, 20 bp, synthetic construct
  source 1..20: mol_type = other DNA; note = Description of Artificial Sequence: Synthetic oligonucleotide
tttattaagaaatatatagt

SEQ ID NO: 24641 - DNA, 20 bp, synthetic construct
  source 1..20: mol_type = other DNA; note = Description of Artificial Sequence: Synthetic oligonucleotide
ttttattaagaaatatatag

SEQ ID NO: 24642 - DNA, 20 bp, synthetic construct
  source 1..20: mol_type = other DNA; note = Description of Artificial Sequence: Synthetic oligonucleotide
attttattaagaaatatata

SEQ ID NO: 24643 - DNA, 20 bp, synthetic construct
  source 1..20: mol_type = other DNA; note = Description of Artificial Sequence: Synthetic oligonucleotide
tattttattaagaaatatat

SEQ ID NO: 24644 - DNA, 20 bp, synthetic construct
  source 1..20: mol_type = other DNA; note = Description of Artificial Sequence: Synthetic oligonucleotide
ttattttattaagaaatata

SEQ ID NO: 24645 - DNA, 20 bp, synthetic construct
  source 1..20: mol_type = other DNA; note = Description of Artificial Sequence: Synthetic oligonucleotide
attattttattaagaaatat

SEQ ID NO: 24646 - DNA, 20 bp, synthetic construct
  source 1..20: mol_type = other DNA; note = Description of Artificial Sequence: Synthetic oligonucleotide
aattattttattaagaaata

SEQ ID NO: 24647 - DNA, 20 bp, synthetic construct
  source 1..20: mol_type = other DNA; note = Description of Artificial Sequence: Synthetic oligonucleotide
gaattattttattaagaaat

SEQ ID NO: 24648 - DNA, 20 bp, synthetic construct
  source 1..20: mol_type = other DNA; note = Description of Artificial Sequence: Synthetic oligonucleotide
agaattattttattaagaaa

SEQ ID NO: 24649 - DNA, 20 bp, synthetic construct
  source 1..20: mol_type = other DNA; note = Description of Artificial Sequence: Synthetic oligonucleotide
gagaattattttattaagaa

SEQ ID NO: 24650 - DNA, 20 bp, synthetic construct
  source 1..20: mol_type = other DNA; note = Description of Artificial Sequence: Synthetic oligonucleotide
tgagaattattttattaaga

SEQ ID NO: 24651 - DNA, 20 bp, synthetic construct
  source 1..20: mol_type = other DNA; note = Description of Artificial Sequence: Synthetic oligonucleotide
ttgagaattattttattaag

SEQ ID NO: 24652 - DNA, 20 bp, synthetic construct
  source 1..20: mol_type = other DNA; note = Description of Artificial Sequence: Synthetic oligonucleotide
tttgagaattattttattaa

SEQ ID NO: 24653 - DNA, 20 bp, synthetic construct
  source 1..20: mol_type = other DNA; note = Description of Artificial Sequence: Synthetic oligonucleotide
atttgagaattattttatta

SEQ ID NO: 24654 - DNA, 20 bp, synthetic construct
  source 1..20: mol_type = other DNA; note = Description of Artificial Sequence: Synthetic oligonucleotide
aatttgagaattattttatt

SEQ ID NO: 24655 - DNA, 20 bp, synthetic construct
  source 1..20: mol_type = other DNA; note = Description of Artificial Sequence: Synthetic oligonucleotide
aaatttgagaattattttat

SEQ ID NO: 24656 - DNA, 20 bp, synthetic construct
  source 1..20: mol_type = other DNA; note = Description of Artificial Sequence: Synthetic oligonucleotide
caaatttgagaattatttta

SEQ ID NO: 24657 - DNA, 20 bp, synthetic construct
  source 1..20: mol_type = other DNA; note = Description of Artificial Sequence: Synthetic oligonucleotide
acaaatttgagaattatttt

SEQ ID NO: 24658 - DNA, 20 bp, synthetic construct
  source 1..20: mol_type = other DNA; note = Description of Artificial Sequence: Synthetic oligonucleotide
aacaaatttgagaattattt

SEQ ID NO: 24659 - DNA, 20 bp, synthetic construct
  source 1..20: mol_type = other DNA; note = Description of Artificial Sequence: Synthetic oligonucleotide
aaacaaatttgagaattatt

SEQ ID NO: 24660 - DNA, 20 bp, synthetic construct
  source 1..20: mol_type = other DNA; note = Description of Artificial Sequence: Synthetic oligonucleotide
gaaacaaatttgagaattat

SEQ ID NO: 24661 - DNA, 20 bp, synthetic construct
  source 1..20: mol_type = other DNA; note = Description of Artificial Sequence: Synthetic oligonucleotide
agaaacaaatttgagaatta

SEQ ID NO: 24662 - DNA, 20 bp, synthetic construct
  source 1..20: mol_type = other DNA; note = Description of Artificial Sequence: Synthetic oligonucleotide
aagaaacaaatttgagaatt

SEQ ID NO: 24663 - DNA, 20 bp, synthetic construct
  source 1..20: mol_type = other DNA; note = Description of Artificial Sequence: Synthetic oligonucleotide
taagaaacaaatttgagaat

SEQ ID NO: 24664 - DNA, 20 bp, synthetic construct
  source 1..20: mol_type = other DNA; note = Description of Artificial Sequence: Synthetic oligonucleotide
ataagaaacaaatttgagaa

SEQ ID NO: 24665 - DNA, 20 bp, synthetic construct
  source 1..20: mol_type = other DNA; note = Description of Artificial Sequence: Synthetic oligonucleotide
cataagaaacaaatttgaga

SEQ ID NO: 24666 - DNA, 20 bp, synthetic construct
  source 1..20: mol_type = other DNA; note = Description of Artificial Sequence: Synthetic oligonucleotide
tcataagaaacaaatttgag

SEQ ID NO: 24667 - DNA, 20 bp, synthetic construct
  source 1..20: mol_type = other DNA; note = Description of Artificial Sequence: Synthetic oligonucleotide
ttcataagaaacaaatttga

SEQ ID NO: 24668 - DNA, 20 bp, synthetic construct
  source 1..20: mol_type = other DNA; note = Description of Artificial Sequence: Synthetic oligonucleotide
attcataagaaacaaatttg

SEQ ID NO: 24669 - DNA, 20 bp, synthetic construct
  source 1..20: mol_type = other DNA; note = Description of Artificial Sequence: Synthetic oligonucleotide
gattcataagaaacaaattt

SEQ ID NO: 24670 - DNA, 20 bp, synthetic construct
  source 1..20: mol_type = other DNA; note = Description of Artificial Sequence: Synthetic oligonucleotide
tgattcataagaaacaaatt

SEQ ID NO: 24671 - DNA, 20 bp, synthetic construct
  source 1..20: mol_type = other DNA; note = Description of Artificial Sequence: Synthetic oligonucleotide
atgattcataagaaacaaat

SEQ ID NO: 24672 - DNA, 20 bp, synthetic construct
  source 1..20: mol_type = other DNA; note = Description of Artificial Sequence: Synthetic oligonucleotide
gatgattcataagaaacaaa

SEQ ID NO: 24673 - DNA, 20 bp, synthetic construct
  source 1..20: mol_type = other DNA; note = Description of Artificial Sequence: Synthetic oligonucleotide
agatgattcataagaaacaa

SEQ ID NO: 24674 - DNA, 20 bp, synthetic construct
  source 1..20: mol_type = other DNA; note = Description of Artificial Sequence: Synthetic oligonucleotide
gagatgattcataagaaaca

SEQ ID NO: 24675 - DNA, 20 bp, synthetic construct
  source 1..20: mol_type = other DNA; note = Description of Artificial Sequence: Synthetic oligonucleotide
agagatgattcataagaaac

SEQ ID NO: 24676 - DNA, 20 bp, synthetic construct
  source 1..20: mol_type = other DNA; note = Description of Artificial Sequence: Synthetic oligonucleotide
gagagatgattcataagaaa

SEQ ID NO: 24677 - DNA, 20 bp, synthetic construct
  source 1..20: mol_type = other DNA; note = Description of Artificial Sequence: Synthetic oligonucleotide
tgagagatgattcataagaa

SEQ ID NO: 24678 - DNA, 20 bp, synthetic construct
  source 1..20: mol_type = other DNA; note = Description of Artificial Sequence: Synthetic oligonucleotide
ttgagagatgattcataaga

SEQ ID NO: 24679 - DNA, 20 bp, synthetic construct
  source 1..20: mol_type = other DNA; note = Description of Artificial Sequence: Synthetic oligonucleotide
tttgagagatgattcataag

SEQ ID NO: 24680 - DNA, 20 bp, synthetic construct
  source 1..20: mol_type = other DNA; note = Description of Artificial Sequence: Synthetic oligonucleotide
atttgagagatgattcataa

SEQ ID NO: 24681 - DNA, 20 bp, synthetic construct
  source 1..20: mol_type = other DNA; note = Description of Artificial Sequence: Synthetic oligonucleotide
gatttgagagatgattcata

SEQ ID NO: 24682 - DNA, 20 bp, synthetic construct
  source 1..20: mol_type = other DNA; note = Description of Artificial Sequence: Synthetic oligonucleotide
agatttgagagatgattcat

SEQ ID NO: 24683 - DNA, 20 bp, synthetic construct
  source 1..20: mol_type = other DNA; note = Description of Artificial Sequence: Synthetic oligonucleotide
tagatttgagagatgattca

SEQ ID NO: 24684 - DNA, 20 bp, synthetic construct
  source 1..20: mol_type = other DNA; note = Description of Artificial Sequence: Synthetic oligonucleotide
ctagatttgagagatgattc

SEQ ID NO: 24685 - DNA, 20 bp, synthetic construct
  source 1..20: mol_type = other DNA; note = Description of Artificial Sequence: Synthetic oligonucleotide
actagatttgagagatgatt

SEQ ID NO: 24686 - DNA, 20 bp, synthetic construct
  source 1..20: mol_type = other DNA; note = Description of Artificial Sequence: Synthetic oligonucleotide
aactagatttgagagatgat

SEQ ID NO: 24687 - DNA, 20 bp, synthetic construct
  source 1..20: mol_type = other DNA; note = Description of Artificial Sequence: Synthetic oligonucleotide
taactagatttgagagatga

SEQ ID NO: 24688 - DNA, 20 bp, synthetic construct
  source 1..20: mol_type = other DNA; note = Description of Artificial Sequence: Synthetic oligonucleotide
ctaactagatttgagagatg

SEQ ID NO: 24689 - DNA, 20 bp, synthetic construct
  source 1..20: mol_type = other DNA; note = Description of Artificial Sequence: Synthetic oligonucleotide
tctaactagatttgagagat

SEQ ID NO: 24690 - DNA, 20 bp, synthetic construct
  source 1..20: mol_type = other DNA; note = Description of Artificial Sequence: Synthetic oligonucleotide
gtctaactagatttgagaga

SEQ ID NO: 24691 - DNA, 20 bp, synthetic construct
  source 1..20: mol_type = other DNA; note = Description of Artificial Sequence: Synthetic oligonucleotide
tgtctaactagatttgagag

SEQ ID NO: 24692 - DNA, 20 bp, synthetic construct
  source 1..20: mol_type = other DNA; note = Description of Artificial Sequence: Synthetic oligonucleotide
ttgtctaactagatttgaga

SEQ ID NO: 24693 - DNA, 20 bp, synthetic construct
  source 1..20: mol_type = other DNA; note = Description of Artificial Sequence: Synthetic oligonucleotide
attgtctaactagatttgag

SEQ ID NO: 24694 - DNA, 20 bp, synthetic construct
  source 1..20: mol_type = other DNA; note = Description of Artificial Sequence: Synthetic oligonucleotide
aattgtctaactagatttga

SEQ ID NO: 24695 - DNA, 20 bp, synthetic construct
  source 1..20: mol_type = other DNA; note = Description of Artificial Sequence: Synthetic oligonucleotide
aaattgtctaactagatttg

SEQ ID NO: 24696 - DNA, 20 bp, synthetic construct
  source 1..20: mol_type = other DNA; note = Description of Artificial Sequence: Synthetic oligonucleotide
caaattgtctaactagattt

SEQ ID NO: 24697 - DNA, 20 bp, synthetic construct
  source 1..20: mol_type = other DNA; note = Description of Artificial Sequence: Synthetic oligonucleotide
gcaaattgtctaactagatt

SEQ ID NO: 24698 - DNA, 20 bp, synthetic construct
  source 1..20: mol_type = other DNA; note = Description of Artificial Sequence: Synthetic oligonucleotide
tgcaaattgtctaactagat

SEQ ID NO: 24699 - DNA, 20 bp, synthetic construct
  source 1..20: mol_type = other DNA; note = Description of Artificial Sequence: Synthetic oligonucleotide
gtgcaaattgtctaactaga

SEQ ID NO: 24700 - DNA, 20 bp, synthetic construct
  source 1..20: mol_type = other DNA; note = Description of Artificial Sequence: Synthetic oligonucleotide
tgtgcaaattgtctaactag

SEQ ID NO: 24701 - DNA, 20 bp, synthetic construct
  source 1..20: mol_type = other DNA; note = Description of Artificial Sequence: Synthetic oligonucleotide
gtgtgcaaattgtctaacta

SEQ ID NO: 24702 - DNA, 20 bp, synthetic construct
  source 1..20: mol_type = other DNA; note = Description of Artificial Sequence: Synthetic oligonucleotide
tgtgtgcaaattgtctaact

SEQ ID NO: 24703 - DNA, 20 bp, synthetic construct
  source 1..20: mol_type = other DNA; note = Description of Artificial Sequence: Synthetic oligonucleotide
atgtgtgcaaattgtctaac

SEQ ID NO: 24704 - DNA, 20 bp, synthetic construct
  source 1..20: mol_type = other DNA; note = Description of Artificial Sequence: Synthetic oligonucleotide
tatgtgtgcaaattgtctaa

SEQ ID NO: 24705 - DNA, 20 bp, synthetic construct
  source 1..20: mol_type = other DNA; note = Description of Artificial Sequence: Synthetic oligonucleotide
gtatgtgtgcaaattgtcta

SEQ ID NO: 24706 - DNA, 20 bp, synthetic construct
  source 1..20: mol_type = other DNA; note = Description of Artificial Sequence: Synthetic oligonucleotide
agtatgtgtgcaaattgtct

SEQ ID NO: 24707 - DNA, 20 bp, synthetic construct
  source 1..20: mol_type = other DNA; note = Description of Artificial Sequence: Synthetic oligonucleotide
aagtatgtgtgcaaattgtc

SEQ ID NO: 24708 - DNA, 20 bp, synthetic construct
  source 1..20: mol_type = other DNA; note = Description of Artificial Sequence: Synthetic oligonucleotide
aaagtatgtgtgcaaattgt

SEQ ID NO: 24709 - DNA, 20 bp, synthetic construct
  source 1..20: mol_type = other DNA; note = Description of Artificial Sequence: Synthetic oligonucleotide
aaaagtatgtgtgcaaattg

SEQ ID NO: 24710 - DNA, 20 bp, synthetic construct
  source 1..20: mol_type = other DNA; note = Description of Artificial Sequence: Synthetic oligonucleotide
gaaaagtatgtgtgcaaatt

SEQ ID NO: 24711 - DNA, 20 bp, synthetic construct
  source 1..20: mol_type = other DNA; note = Description of Artificial Sequence: Synthetic oligonucleotide
agaaaagtatgtgtgcaaat

SEQ ID NO: 24712 - DNA, 20 bp, synthetic construct
  source 1..20: mol_type = other DNA; note = Description of Artificial Sequence: Synthetic oligonucleotide
tagaaaagtatgtgtgcaaa

SEQ ID NO: 24713 - DNA, 20 bp, synthetic construct
  source 1..20: mol_type = other DNA; note = Description of Artificial Sequence: Synthetic oligonucleotide
ttagaaaagtatgtgtgcaa

SEQ ID NO: 24714 - DNA, 20 bp, synthetic construct
  source 1..20: mol_type = other DNA; note = Description of Artificial Sequence: Synthetic oligonucleotide
cttagaaaagtatgtgtgca

SEQ ID NO: 24715 - DNA, 20 bp, synthetic construct
  source 1..20: mol_type = other DNA; note = Description of Artificial Sequence: Synthetic oligonucleotide
ccttagaaaagtatgtgtgc

SEQ ID NO: 24716 - DNA, 20 bp, synthetic construct
  source 1..20: mol_type = other DNA; note = Description of Artificial Sequence: Synthetic oligonucleotide
cccttagaaaagtatgtgtg

SEQ ID NO: 24717 - DNA, 20 bp, synthetic construct
  source 1..20: mol_type = other DNA; note = Description of Artificial Sequence: Synthetic oligonucleotide
tcccttagaaaagtatgtgt

SEQ ID NO: 24718 - DNA, 20 bp, synthetic construct
  source 1..20: mol_type = other DNA; note = Description of Artificial Sequence: Synthetic oligonucleotide
gtcccttagaaaagtatgtg

SEQ ID NO: 24719 - DNA, 20 bp, synthetic construct
  source 1..20: mol_type = other DNA; note = Description of Artificial Sequence: Synthetic oligonucleotide
tgtcccttagaaaagtatgt

SEQ ID NO: 24720 - DNA, 20 bp, synthetic construct
  source 1..20: mol_type = other DNA; note = Description of Artificial Sequence: Synthetic oligonucleotide
atgtcccttagaaaagtatg

SEQ ID NO: 24721 - DNA, 20 bp, synthetic construct
  source 1..20: mol_type = other DNA; note = Description of Artificial Sequence: Synthetic oligonucleotide
aatgtcccttagaaaagtat

SEQ ID NO: 24722 - DNA, 20 bp, synthetic construct
  source 1..20: mol_type = other DNA; note = Description of Artificial Sequence: Synthetic oligonucleotide
taatgtcccttagaaaagta

SEQ ID NO: 24723 - DNA, 20 bp, synthetic construct
  source 1..20: mol_type = other DNA; note = Description of Artificial Sequence: Synthetic oligonucleotide
ataatgtcccttagaaaagt

SEQ ID NO: 24724 - DNA, 20 bp, synthetic construct
  source 1..20: mol_type = other DNA; note = Description of Artificial Sequence: Synthetic oligonucleotide
gataatgtcccttagaaaag

SEQ ID NO: 24725 - DNA, 20 bp, synthetic construct
  source 1..20: mol_type = other DNA; note = Description of Artificial Sequence: Synthetic oligonucleotide
agataatgtcccttagaaaa

SEQ ID NO: 24726 - DNA, 20 bp, synthetic construct
  source 1..20: mol_type = other DNA; note = Description of Artificial Sequence: Synthetic oligonucleotide
aagataatgtcccttagaaa

SEQ ID NO: 24727 - DNA, 20 bp, synthetic construct
  source 1..20: mol_type = other DNA; note = Description of Artificial Sequence: Synthetic oligonucleotide
gaagataatgtcccttagaa

SEQ ID NO: 24728 - DNA, 20 bp, synthetic construct
  source 1..20: mol_type = other DNA; note = Description of Artificial Sequence: Synthetic oligonucleotide
ggaagataatgtcccttaga

SEQ ID NO: 24729 - DNA, 20 bp, synthetic construct
  source 1..20: mol_type = other DNA; note = Description of Artificial Sequence: Synthetic oligonucleotide
aggaagataatgtcccttag

SEQ ID NO: 24730 - DNA, 20 bp, synthetic construct
  source 1..20: mol_type = other DNA; note = Description of Artificial Sequence: Synthetic oligonucleotide
aaggaagataatgtccctta

SEQ ID NO: 24731 - DNA, 20 bp, synthetic construct
  source 1..20: mol_type = other DNA; note = Description of Artificial Sequence: Synthetic oligonucleotide
gaaggaagataatgtccctt

SEQ ID NO: 24732 - DNA, 20 bp, synthetic construct
  source 1..20: mol_type = other DNA; note = Description of Artificial Sequence: Synthetic oligonucleotide
tgaaggaagataatgtccct

SEQ ID NO: 24733 - DNA, 20 bp, synthetic construct
  source 1..20: mol_type = other DNA; note = Description of Artificial Sequence: Synthetic oligonucleotide
ctgaaggaagataatgtccc

SEQ ID NO: 24734 - DNA, 20 bp, synthetic construct
  source 1..20: mol_type = other DNA; note = Description of Artificial Sequence: Synthetic oligonucleotide
cctgaaggaagataatgtcc

SEQ ID NO: 24735 - DNA, 20 bp, synthetic construct
  source 1..20: mol_type = other DNA; note = Description of Artificial Sequence: Synthetic oligonucleotide
acctgaaggaagataatgtc

SEQ ID NO: 24736 - DNA, 20 bp, synthetic construct
  source 1..20: mol_type = other DNA; note = Description of Artificial Sequence: Synthetic oligonucleotide
aacctgaaggaagataatgt

SEQ ID NO: 24737 - DNA, 20 bp, synthetic construct
  source 1..20: mol_type = other DNA; note = Description of Artificial Sequence: Synthetic oligonucleotide
aaacctgaaggaagataatg

SEQ ID NO: 24738 - DNA, 20 bp, synthetic construct
  source 1..20: mol_type = other DNA; note = Description of Artificial Sequence: Synthetic oligonucleotide
aaaacctgaaggaagataat

SEQ ID NO: 24739 - DNA, 20 bp, synthetic construct
  source 1..20: mol_type = other DNA; note = Description of Artificial Sequence: Synthetic oligonucleotide
aaaaacctgaaggaagataa

SEQ ID NO: 24740 - DNA, 20 bp, synthetic construct
  source 1..20: mol_type = other DNA; note = Description of Artificial Sequence: Synthetic oligonucleotide
taaaaacctgaaggaagata

SEQ ID NO: 24741 - DNA, 20 bp, synthetic construct
  source 1..20: mol_type = other DNA; note = Description of Artificial Sequence: Synthetic oligonucleotide
gtaaaaacctgaaggaagat

SEQ ID NO: 24742 - DNA, 20 bp, synthetic construct
  source 1..20: mol_type = other DNA; note = Description of Artificial Sequence: Synthetic oligonucleotide
ggtaaaaacctgaaggaaga

SEQ ID NO: 24743 - DNA, 20 bp, synthetic construct
  source 1..20: mol_type = other DNA; note = Description of Artificial Sequence: Synthetic oligonucleotide
aggtaaaaacctgaaggaag

SEQ ID NO: 24744 - DNA, 20 bp, synthetic construct
  source 1..20: mol_type = other DNA; note = Description of Artificial Sequence: Synthetic oligonucleotide
gaggtaaaaacctgaaggaa

SEQ ID NO: 24745 - DNA, 20 bp, synthetic construct
  source 1..20: mol_type = other DNA; note = Description of Artificial Sequence: Synthetic oligonucleotide
ggaggtaaaaacctgaagga

SEQ ID NO: 24746 - DNA, 20 bp, synthetic construct
  source 1..20: mol_type = other DNA; note = Description of Artificial Sequence: Synthetic oligonucleotide
tggaggtaaaaacctgaagg

SEQ ID NO: 24747 - DNA, 20 bp, synthetic construct
  source 1..20: mol_type = other DNA; note = Description of Artificial Sequence: Synthetic oligonucleotide
gtggaggtaaaaacctgaag

SEQ ID NO: 24748 - DNA, 20 bp, synthetic construct
  source 1..20: mol_type = other DNA; note = Description of Artificial Sequence: Synthetic oligonucleotide
agtggaggtaaaaacctgaa

SEQ ID NO: 24749 - DNA, 20 bp, synthetic construct
  source 1..20: mol_type = other DNA; note = Description of Artificial Sequence: Synthetic oligonucleotide
gagtggaggtaaaaacctga

SEQ ID NO: 24750 - DNA, 20 bp, synthetic construct
  source 1..20: mol_type = other DNA; note = Description of Artificial Sequence: Synthetic oligonucleotide
tgagtggaggtaaaaacctg

SEQ ID NO: 24751 - DNA, 20 bp, synthetic construct
  source 1..20: mol_type = other DNA; note = Description of Artificial Sequence: Synthetic oligonucleotide
atgagtggaggtaaaaacct

SEQ ID NO: 24752 - DNA, 20 bp, synthetic construct
  source 1..20: mol_type = other DNA; note = Description of Artificial Sequence: Synthetic oligonucleotide
gatgagtggaggtaaaaacc

SEQ ID NO: 24753 - DNA, 20 bp, synthetic construct
  source 1..20: mol_type = other DNA; note = Description of Artificial Sequence: Synthetic oligonucleotide
ggatgagtggaggtaaaaac

SEQ ID NO: 24754 - DNA, 20 bp, synthetic construct
  source 1..20: mol_type = other DNA; note = Description of Artificial Sequence: Synthetic oligonucleotide
aggatgagtggaggtaaaaa

SEQ ID NO: 24755 - DNA, 20 bp, synthetic construct
  source 1..20: mol_type = other DNA; note = Description of Artificial Sequence: Synthetic oligonucleotide
aaggatgagtggaggtaaaa

SEQ ID NO: 24756 - DNA, 20 bp, synthetic construct
  source 1..20: mol_type = other DNA; note = Description of Artificial Sequence: Synthetic oligonucleotide
taaggatgagtggaggtaaa

SEQ ID NO: 24757 - DNA, 20 bp, synthetic construct
  source 1..20: mol_type = other DNA; note = Description of Artificial Sequence: Synthetic oligonucleotide
ctaaggatgagtggaggtaa

SEQ ID NO: 24758 - DNA, 20 bp, synthetic construct
  source 1..20: mol_type = other DNA; note = Description of Artificial Sequence: Synthetic oligonucleotide
tctaaggatgagtggaggta

SEQ ID NO: 24759 - DNA, 20 bp, synthetic construct
  source 1..20: mol_type = other DNA; note = Description of Artificial Sequence: Synthetic oligonucleotide
ctctaaggatgagtggaggt

SEQ ID NO: 24760 - DNA, 20 bp, synthetic construct
  source 1..20: mol_type = other DNA; note = Description of Artificial Sequence: Synthetic oligonucleotide
gctctaaggatgagtggagg

SEQ ID NO: 24761 - DNA, 20 bp, synthetic construct
  source 1..20: mol_type = other DNA; note = Description of Artificial Sequence: Synthetic oligonucleotide
ggctctaaggatgagtggag

SEQ ID NO: 24762 - DNA, 20 bp, synthetic construct
  source 1..20: mol_type = other DNA; note = Description of Artificial Sequence: Synthetic oligonucleotide
gggctctaaggatgagtgga

SEQ ID NO: 24763 - DNA, 20 bp, synthetic construct
  source 1..20: mol_type = other DNA; note = Description of Artificial Sequence: Synthetic oligonucleotide
tgggctctaaggatgagtgg

SEQ ID NO: 24764 - DNA, 20 bp, synthetic construct
  source 1..20: mol_type = other DNA; note = Description of Artificial Sequence: Synthetic oligonucleotide
gtgggctctaaggatgagtg

SEQ ID NO: 24765 - DNA, 20 bp, synthetic construct
  source 1..20: mol_type = other DNA; note = Description of Artificial Sequence: Synthetic oligonucleotide
agtgggctctaaggatgagt

SEQ ID NO: 24766 - DNA, 20 bp, synthetic construct
  source 1..20: mol_type = other DNA; note = Description of Artificial Sequence: Synthetic oligonucleotide
cagtgggctctaaggatgag

SEQ ID NO: 24767 - DNA, 20 bp, synthetic construct
  source 1..20: mol_type = other DNA; note = Description of Artificial Sequence: Synthetic oligonucleotide
tcagtgggctctaaggatga

SEQ ID NO: 24768 - DNA, 20 bp, synthetic construct
  source 1..20: mol_type = other DNA; note = Description of Artificial Sequence: Synthetic oligonucleotide
gtcagtgggctctaaggatg

SEQ ID NO: 24769 - DNA, 20 bp, synthetic construct
  source 1..20: mol_type = other DNA; note = Description of Artificial Sequence: Synthetic oligonucleotide
agtcagtgggctctaaggat

SEQ ID NO: 24770 - DNA, 20 bp, synthetic construct
  source 1..20: mol_type = other DNA; note = Description of Artificial Sequence: Synthetic oligonucleotide
cagtcagtgggctctaagga

SEQ ID NO: 24771 - DNA, 20 bp, synthetic construct
  source 1..20: mol_type = other DNA; note = Description of Artificial Sequence: Synthetic oligonucleotide
gcagtcagtgggctctaagg

SEQ ID NO: 24772 - DNA, 20 bp, synthetic construct
  source 1..20: mol_type = other DNA; note = Description of Artificial Sequence: Synthetic oligonucleotide
agcagtcagtgggctctaag

SEQ ID NO: 24773 - DNA, 20 bp, synthetic construct
  source 1..20: mol_type = other DNA; note = Description of Artificial Sequence: Synthetic oligonucleotide
gagcagtcagtgggctctaa

SEQ ID NO: 24774 - DNA, 20 bp, synthetic construct
  source 1..20: mol_type = other DNA; note = Description of Artificial Sequence: Synthetic oligonucleotide
ggagcagtcagtgggctcta

SEQ ID NO: 24775 - DNA, 20 bp, synthetic construct
  source 1..20: mol_type = other DNA; note = Description of Artificial Sequence: Synthetic oligonucleotide
gggagcagtcagtgggctct

SEQ ID NO: 24776 - DNA, 20 bp, synthetic construct
  source 1..20: mol_type = other DNA; note = Description of Artificial Sequence: Synthetic oligonucleotide
ggggagcagtcagtgggctc

SEQ ID NO: 24777 - DNA, 20 bp, synthetic construct
  source 1..20: mol_type = other DNA; note = Description of Artificial Sequence: Synthetic oligonucleotide
aggggagcagtcagtgggct

SEQ ID NO: 24778 - DNA, 20 bp, synthetic construct
  source 1..20: mol_type = other DNA; note = Description of Artificial Sequence: Synthetic oligonucleotide
aaggggagcagtcagtgggc

SEQ ID NO: 24779 - DNA, 20 bp, synthetic construct
  source 1..20: mol_type = other DNA; note = Description of Artificial Sequence: Synthetic oligonucleotide
aaaggggagcagtcagtggg

SEQ ID NO: 24780 - DNA, 20 bp, synthetic construct
  source 1..20: mol_type = other DNA; note = Description of Artificial Sequence: Synthetic oligonucleotide
taaaggggagcagtcagtgg

SEQ ID NO: 24781 - DNA, 20 bp, synthetic construct
  source 1..20: mol_type = other DNA; note = Description of Artificial Sequence: Synthetic oligonucleotide
ataaaggggagcagtcagtg

SEQ ID NO: 24782 - DNA, 20 bp, synthetic construct
  source 1..20: mol_type = other DNA; note = Description of Artificial Sequence: Synthetic oligonucleotide
tataaaggggagcagtcagt

SEQ ID NO: 24783 - DNA, 20 bp, synthetic construct
  source 1..20: mol_type = other DNA; note = Description of Artificial Sequence: Synthetic oligonucleotide
gtataaaggggagcagtcag

SEQ ID NO: 24784 - DNA, 20 bp, synthetic construct
  source 1..20: mol_type = other DNA; note = Description of Artificial Sequence: Synthetic oligonucleotide
ggtataaaggggagcagtca

SEQ ID NO: 24785 - DNA, 20 bp, synthetic construct
  source 1..20: mol_type = other DNA; note = Description of Artificial Sequence: Synthetic oligonucleotide
aggtataaaggggagcagtc

SEQ ID NO: 24786 - DNA, 20 bp, synthetic construct
  source 1..20: mol_type = other DNA; note = Description of Artificial Sequence: Synthetic oligonucleotide
caggtataaaggggagcagt

SEQ ID NO: 24787 - DNA, 20 bp, synthetic construct
  source 1..20: mol_type = other DNA; note = Description of Artificial Sequence: Synthetic oligonucleotide
acaggtataaaggggagcag

SEQ ID NO: 24788 - DNA, 20 bp, synthetic construct
  source 1..20: mol_type = other DNA; note = Description of Artificial Sequence: Synthetic oligonucleotide
aacaggtataaaggggagca

SEQ ID NO: 24789 - DNA, 20 bp, synthetic construct
  source 1..20: mol_type = other DNA; note = Description of Artificial Sequence: Synthetic oligonucleotide
caacaggtataaaggggagc

SEQ ID NO: 24790 - DNA, 20 bp, synthetic construct
  source 1..20: mol_type = other DNA; note = Description of Artificial Sequence: Synthetic oligonucleotide
ccaacaggtataaaggggag

SEQ ID NO: 24791 - DNA, 20 bp, synthetic construct
  source 1..20: mol_type = other DNA; note = Description of Artificial Sequence: Synthetic oligonucleotide
gccaacaggtataaagggga

SEQ ID NO: 24792 - DNA, 20 bp, synthetic construct
  source 1..20: mol_type = other DNA; note = Description of Artificial Sequence: Synthetic oligonucleotide
ggccaacaggtataaagggg

SEQ ID NO: 24793 - DNA, 20 bp, synthetic construct
  source 1..20: mol_type = other DNA; note = Description of Artificial Sequence: Synthetic oligonucleotide
gggccaacaggtataaaggg

SEQ ID NO: 24794 - DNA, 20 bp, synthetic construct
  source 1..20: mol_type = other DNA; note = Description of Artificial Sequence: Synthetic oligonucleotide
agggccaacaggtataaagg

SEQ ID NO: 24795 - DNA, 20 bp, synthetic construct
  source 1..20: mol_type = other DNA; note = Description of Artificial Sequence: Synthetic oligonucleotide
cagggccaacaggtataaag

SEQ ID NO: 24796 - DNA, 20 bp, synthetic construct
  source 1..20: mol_type = other DNA; note = Description of Artificial Sequence: Synthetic oligonucleotide
gcagggccaacaggtataaa

SEQ ID NO: 24797 - DNA, 20 bp, synthetic construct
  source 1..20: mol_type = other DNA; note = Description of Artificial Sequence: Synthetic oligonucleotide
ggcagggccaacaggtataa

SEQ ID NO: 24798 - DNA, 20 bp, synthetic construct
  source 1..20: mol_type = other DNA; note = Description of Artificial Sequence: Synthetic oligonucleotide
aggcagggccaacaggtata

SEQ ID NO: 24799 - DNA, 20 bp, synthetic construct
  source 1..20: mol_type = other DNA; note = Description of Artificial Sequence: Synthetic oligonucleotide
taggcagggccaacaggtat

SEQ ID NO: 24800 - DNA, 20 bp, synthetic construct
  source 1..20: mol_type = other DNA; note = Description of Artificial Sequence: Synthetic oligonucleotide
ataggcagggccaacaggta

SEQ ID NO: 24801 - DNA, 20 bp, synthetic construct
  source 1..20: mol_type = other DNA; note = Description of Artificial Sequence: Synthetic oligonucleotide
tataggcagggccaacaggt

SEQ ID NO: 24802 - DNA, 20 bp, synthetic construct
  source 1..20: mol_type = other DNA; note = Description of Artificial Sequence: Synthetic oligonucleotide
ctataggcagggccaacagg

SEQ ID NO: 24803 - DNA, 20 bp, synthetic construct
  source 1..20: mol_type = other DNA; note = Description of Artificial Sequence: Synthetic oligonucleotide
cctataggcagggccaacag

SEQ ID NO: 24804 - DNA, 20 bp, synthetic construct
  source 1..20: mol_type = other DNA; note = Description of Artificial Sequence: Synthetic oligonucleotide
tcctataggcagggccaaca

SEQ ID NO: 24805 - DNA, 20 bp, synthetic construct
  source 1..20: mol_type = other DNA; note = Description of Artificial Sequence: Synthetic oligonucleotide
ctcctataggcagggccaac

SEQ ID NO: 24806 - DNA, 20 bp, synthetic construct
  source 1..20: mol_type = other DNA; note = Description of Artificial Sequence: Synthetic oligonucleotide
tctcctataggcagggccaa

SEQ ID NO: 24807 - DNA, 20 bp, synthetic construct
  source 1..20: mol_type = other DNA; note = Description of Artificial Sequence: Synthetic oligonucleotide
ctctcctataggcagggcca

SEQ ID NO: 24808 - DNA, 20 bp, synthetic construct
  source 1..20: mol_type = other DNA; note = Description of Artificial Sequence: Synthetic oligonucleotide
tctctcctataggcagggcc

SEQ ID NO: 24809 - DNA, 20 bp, synthetic construct
  source 1..20: mol_type = other DNA; note = Description of Artificial Sequence: Synthetic oligonucleotide
ttctctcctataggcagggc

SEQ ID NO: 24810 - DNA, 20 bp, synthetic construct
  source 1..20: mol_type = other DNA; note = Description of Artificial Sequence: Synthetic oligonucleotide
attctctcctataggcaggg

SEQ ID NO: 24811 - DNA, 20 bp, synthetic construct
  source 1..20: mol_type = other DNA; note = Description of Artificial Sequence: Synthetic oligonucleotide
tattctctcctataggcagg

SEQ ID NO: 24812 - DNA, 20 bp, synthetic construct
  source 1..20: mol_type = other DNA; note = Description of Artificial Sequence: Synthetic oligonucleotide
atattctctcctataggcag

SEQ ID NO: 24813 - DNA, 20 bp, synthetic construct
  source 1..20: mol_type = other DNA; note = Description of Artificial Sequence: Synthetic oligonucleotide
aatattctctcctataggca

SEQ ID NO: 24814 - DNA, 20 bp, synthetic construct
  source 1..20: mol_type = other DNA; note = Description of Artificial Sequence: Synthetic oligonucleotide
aaatattctctcctataggc

SEQ ID NO: 24815 - DNA, 20 bp, synthetic construct
  source 1..20: mol_type = other DNA; note = Description of Artificial Sequence: Synthetic oligonucleotide
caaatattctctcctatagg

SEQ ID NO: 24816 - DNA, 20 bp, synthetic construct
  source 1..20: mol_type = other DNA; note = Description of Artificial Sequence: Synthetic oligonucleotide
ccaaatattctctcctatag

SEQ ID NO: 24817 - DNA, 20 bp, synthetic construct
  source 1..20: mol_type = other DNA; note = Description of Artificial Sequence: Synthetic oligonucleotide
tccaaatattctctcctata

SEQ ID NO: 24818 - DNA, 20 bp, synthetic construct
  source 1..20: mol_type = other DNA; note = Description of Artificial Sequence: Synthetic oligonucleotide
ctccaaatattctctcctat

SEQ ID NO: 24819 - DNA, 20 bp, synthetic construct
  source 1..20: mol_type = other DNA; note = Description of Artificial Sequence: Synthetic oligonucleotide
tctccaaatattctctccta

SEQ ID NO: 24820 - DNA, 20 bp, synthetic construct
  source 1..20: mol_type = other DNA; note = Description of Artificial Sequence: Synthetic oligonucleotide
atctccaaatattctctcct

SEQ ID NO: 24821 - DNA, 20 bp, synthetic construct
  source 1..20: mol_type = other DNA; note = Description of Artificial Sequence: Synthetic oligonucleotide
tatctccaaatattctctcc

SEQ ID NO: 24822 - DNA, 20 bp, synthetic construct
  source 1..20: mol_type = other DNA; note = Description of Artificial Sequence: Synthetic oligonucleotide
ctatctccaaatattctctc

SEQ ID NO: 24823 - DNA, 20 bp, synthetic construct
  source 1..20: mol_type = other DNA; note = Description of Artificial Sequence: Synthetic oligonucleotide
cctatctccaaatattctct

SEQ ID NO: 24824 - DNA, 20 bp, synthetic construct
  source 1..20: mol_type = other DNA; note = Description of Artificial Sequence: Synthetic oligonucleotide
gcctatctccaaatattctc

SEQ ID NO: 24825 - DNA, 20 bp, synthetic construct
  source 1..20: mol_type = other DNA; note = Description of Artificial Sequence: Synthetic oligonucleotide
tgcctatctccaaatattct

SEQ ID NO: 24826 - DNA, 20 bp, synthetic construct
  source 1..20: mol_type = other DNA; note = Description of Artificial Sequence: Synthetic oligonucleotide
ctgcctatctccaaatattc

SEQ ID NO: 24827 - DNA, 20 bp, synthetic construct
  source 1..20: mol_type = other DNA; note = Description of Artificial Sequence: Synthetic oligonucleotide
gctgcctatctccaaatatt

SEQ ID NO: 24828 - DNA, 20 bp, synthetic construct
  source 1..20: mol_type = other DNA; note = Description of Artificial Sequence: Synthetic oligonucleotide
agctgcctatctccaaatat

SEQ ID NO: 24829 - DNA, 20 bp, synthetic construct
  source 1..20: mol_type = other DNA; note = Description of Artificial Sequence: Synthetic oligonucleotide
aagctgcctatctccaaata

SEQ ID NO: 24830 - DNA, 20 bp, synthetic construct
  source 1..20: mol_type = other DNA; note = Description of Artificial Sequence: Synthetic oligonucleotide
gaagctgcctatctccaaat

SEQ ID NO: 24831 - DNA, 20 bp, synthetic construct
  source 1..20: mol_type = other DNA; note = Description of Artificial Sequence: Synthetic oligonucleotide
tgaagctgcctatctccaaa

SEQ ID NO: 24832 - DNA, 20 bp, synthetic construct
  source 1..20: mol_type = other DNA; note = Description of Artificial Sequence: Synthetic oligonucleotide
ctgaagctgcctatctccaa

SEQ ID NO: 24833 - DNA, 20 bp, synthetic construct
  source 1..20: mol_type = other DNA; note = Description of Artificial Sequence: Synthetic oligonucleotide
cctgaagctgcctatctcca

SEQ ID NO: 24834 - DNA, 20 bp, synthetic construct
  source 1..20: mol_type = other DNA; note = Description of Artificial Sequence: Synthetic oligonucleotide
tcctgaagctgcctatctcc

SEQ ID NO: 24835 - DNA, 20 bp, synthetic construct
  source 1..20: mol_type = other DNA; note = Description of Artificial Sequence: Synthetic oligonucleotide
atcctgaagctgcctatctc

SEQ ID NO: 24836 - DNA, 20 bp, synthetic construct
  source 1..20: mol_type = other DNA; note = Description of Artificial Sequence: Synthetic oligonucleotide
catcctgaagctgcctatct

SEQ ID NO: 24837 - DNA, 20 bp, synthetic construct
  source 1..20: mol_type = other DNA; note = Description of Artificial Sequence: Synthetic oligonucleotide
gcatcctgaagctgcctatc

SEQ ID NO: 24838 - DNA, 20 bp, synthetic construct
  source 1..20: mol_type = other DNA; note = Description of Artificial Sequence: Synthetic oligonucleotide
tgcatcctgaagctgcctat

SEQ ID NO: 24839 - DNA, 20 bp, synthetic construct
  source 1..20: mol_type = other DNA; note = Description of Artificial Sequence: Synthetic oligonucleotide
atgcatcctgaagctgccta

SEQ ID NO: 24840 - DNA, 20 bp, synthetic construct
  source 1..20: mol_type = other DNA; note = Description of Artificial Sequence: Synthetic oligonucleotide
aatgcatcctgaagctgcct

SEQ ID NO: 24841 - DNA, 20 bp, synthetic construct
  source 1..20: mol_type = other DNA; note = Description of Artificial Sequence: Synthetic oligonucleotide
caatgcatcctgaagctgcc

SEQ ID NO: 24842 - DNA, 20 bp, synthetic construct
  source 1..20: mol_type = other DNA; note = Description of Artificial Sequence: Synthetic oligonucleotide
gcaatgcatcctgaagctgc

SEQ ID NO: 24843 - DNA, 20 bp, synthetic construct
  source 1..20: mol_type = other DNA; note = Description of Artificial Sequence: Synthetic oligonucleotide
tgcaatgcatcctgaagctg

SEQ ID NO: 24844 - DNA, 20 bp, synthetic construct
  source 1..20: mol_type = other DNA; note = Description of Artificial Sequence: Synthetic oligonucleotide
ttgcaatgcatcctgaagct

SEQ ID NO: 24845 - DNA, 20 bp, synthetic construct
  source 1..20: mol_type = other DNA; note = Description of Artificial Sequence: Synthetic oligonucleotide
attgcaatgcatcctgaagc

SEQ ID NO: 24846 - DNA, 20 bp, synthetic construct
  source 1..20: mol_type = other DNA; note = Description of Artificial Sequence: Synthetic oligonucleotide
gattgcaatgcatcctgaag

SEQ ID NO: 24847 - DNA, 20 bp, synthetic construct
  source 1..20: mol_type = other DNA; note = Description of Artificial Sequence: Synthetic oligonucleotide
tgattgcaatgcatcctgaa

SEQ ID NO: 24848 - DNA, 20 bp, synthetic construct
  source 1..20: mol_type = other DNA; note = Description of Artificial Sequence: Synthetic oligonucleotide
atgattgcaatgcatcctga

SEQ ID NO: 24849 - DNA, 20 bp, synthetic construct
  source 1..20: mol_type = other DNA; note = Description of Artificial Sequence: Synthetic oligonucleotide
gatgattgcaatgcatcctg

SEQ ID NO: 24850 - DNA, 20 bp, synthetic construct
  source 1..20: mol_type = other DNA; note = Description of Artificial Sequence: Synthetic oligonucleotide
ggatgattgcaatgcatcct

SEQ ID NO: 24851 - DNA, 20 bp, synthetic construct
  source 1..20: mol_type = other DNA; note = Description of Artificial Sequence: Synthetic oligonucleotide
aggatgattgcaatgcatcc

SEQ ID NO: 24852 - DNA, 20 bp, synthetic construct
  source 1..20: mol_type = other DNA; note = Description of Artificial Sequence: Synthetic oligonucleotide
aaggatgattgcaatgcatc

SEQ ID NO: 24853 - DNA, 20 bp, synthetic construct
  source 1..20: mol_type = other DNA; note = Description of Artificial Sequence: Synthetic oligonucleotide
aaaggatgattgcaatgcat

SEQ ID NO: 24854 - DNA, 20 bp, synthetic construct
  source 1..20: mol_type = other DNA; note = Description of Artificial Sequence: Synthetic oligonucleotide
aaaaggatgattgcaatgca

SEQ ID NO: 24855 - DNA, 20 bp, synthetic construct
  source 1..20: mol_type = other DNA; note = Description of Artificial Sequence: Synthetic oligonucleotide
gaaaaggatgattgcaatgc

SEQ ID NO: 24856 - DNA, 20 bp, synthetic construct
  source 1..20: mol_type = other DNA; note = Description of Artificial Sequence: Synthetic oligonucleotide
agaaaaggatgattgcaatg

SEQ ID NO: 24857 - DNA, 20 bp, synthetic construct
  source 1..20: mol_type = other DNA; note = Description of Artificial Sequence: Synthetic oligonucleotide
aagaaaaggatgattgcaat

SEQ ID NO: 24858 - DNA, 20 bp, synthetic construct
  source 1..20: mol_type = other DNA; note = Description of Artificial Sequence: Synthetic oligonucleotide
taagaaaaggatgattgcaa

SEQ ID NO: 24859 - DNA, 20 bp, synthetic construct
  source 1..20: mol_type = other DNA; note = Description of Artificial Sequence: Synthetic oligonucleotide
ttaagaaaaggatgattgca

SEQ ID NO: 24860 - DNA, 20 bp, synthetic construct
  source 1..20: mol_type = other DNA; note = Description of Artificial Sequence: Synthetic oligonucleotide
tttaagaaaaggatgattgc

SEQ ID NO: 24861 - DNA, 20 bp, synthetic construct
  source 1..20: mol_type = other DNA; note = Description of Artificial Sequence: Synthetic oligonucleotide
atttaagaaaaggatgattg

SEQ ID NO: 24862 - DNA, 20 bp, synthetic construct
  source 1..20: mol_type = other DNA; note = Description of Artificial Sequence: Synthetic oligonucleotide
aatttaagaaaaggatgatt

SEQ ID NO: 24863 - DNA, 20 bp, synthetic construct
  source 1..20: mol_type = other DNA; note = Description of Artificial Sequence: Synthetic oligonucleotide
taatttaagaaaaggatgat

SEQ ID NO: 24864 - DNA, 20 bp, synthetic construct
  source 1..20: mol_type = other DNA; note = Description of Artificial Sequence: Synthetic oligonucleotide
ataatttaagaaaaggatga

SEQ ID NO: 24865 - DNA, 20 bp, synthetic construct
  source 1..20: mol_type = other DNA; note = Description of Artificial Sequence: Synthetic oligonucleotide
cataatttaagaaaaggatg

SEQ ID NO: 24866 - DNA, 20 bp, synthetic construct
  source 1..20: mol_type = other DNA; note = Description of Artificial Sequence: Synthetic oligonucleotide
acataatttaagaaaaggat

SEQ ID NO: 24867 - DNA, 20 bp, synthetic construct
  source 1..20: mol_type = other DNA; note = Description of Artificial Sequence: Synthetic oligonucleotide
gacataatttaagaaaagga

SEQ ID NO: 24868 - DNA, 20 bp, synthetic construct
  source 1..20: mol_type = other DNA; note = Description of Artificial Sequence: Synthetic oligonucleotide
tgacataatttaagaaaagg

SEQ ID NO: 24869 - DNA, 20 bp, synthetic construct
  source 1..20: mol_type = other DNA; note = Description of Artificial Sequence: Synthetic oligonucleotide
gtgacataatttaagaaaag

SEQ ID NO: 24870 - DNA, 20 bp, synthetic construct
  source 1..20: mol_type = other DNA; note = Description of Artificial Sequence: Synthetic oligonucleotide
agtgacataatttaagaaaa

SEQ ID NO: 24871 - DNA, 20 bp, synthetic construct
  source 1..20: mol_type = other DNA; note = Description of Artificial Sequence: Synthetic oligonucleotide
tagtgacataatttaagaaa

SEQ ID NO: 24872 - DNA, 20 bp, synthetic construct
  source 1..20: mol_type = other DNA; note = Description of Artificial Sequence: Synthetic oligonucleotide
ctagtgacataatttaagaa

SEQ ID NO: 24873 - DNA, 20 bp, synthetic construct
  source 1..20: mol_type = other DNA; note = Description of Artificial Sequence: Synthetic oligonucleotide
actagtgacataatttaaga

SEQ ID NO: 24874 - DNA, 20 bp, synthetic construct
  source 1..20: mol_type = other DNA; note = Description of Artificial Sequence: Synthetic oligonucleotide
gactagtgacataatttaag

SEQ ID NO: 24875 - DNA, 20 bp, synthetic construct
  source 1..20: mol_type = other DNA; note = Description of Artificial Sequence: Synthetic oligonucleotide
agactagtgacataatttaa

SEQ ID NO: 24876 - DNA, 20 bp, synthetic construct
  source 1..20: mol_type = other DNA; note = Description of Artificial Sequence: Synthetic oligonucleotide
aagactagtgacataattta

SEQ ID NO: 24877 - DNA, 20 bp, synthetic construct
  source 1..20: mol_type = other DNA; note = Description of Artificial Sequence: Synthetic oligonucleotide
aaagactagtgacataattt

SEQ ID NO: 24878 - DNA, 20 bp, synthetic construct
  source 1..20: mol_type = other DNA; note = Description of Artificial Sequence: Synthetic oligonucleotide
aaaagactagtgacataatt

SEQ ID NO: 24879 - DNA, 20 bp, synthetic construct
  source 1..20: mol_type = other DNA; note = Description of Artificial Sequence: Synthetic oligonucleotide
taaaagactagtgacataat

SEQ ID NO: 24880 - DNA, 20 bp, synthetic construct
  source 1..20: mol_type = other DNA; note = Description of Artificial Sequence: Synthetic oligonucleotide
ataaaagactagtgacataa

SEQ ID NO: 24881 - DNA, 20 bp, synthetic construct
  source 1..20: mol_type = other DNA; note = Description of Artificial Sequence: Synthetic oligonucleotide
aataaaagactagtgacata

SEQ ID NO: 24882 - DNA, 20 bp, synthetic construct
  source 1..20: mol_type = other DNA; note = Description of Artificial Sequence: Synthetic oligonucleotide
aaataaaagactagtgacat

SEQ ID NO: 24883 - DNA, 20 bp, synthetic construct
  source 1..20: mol_type = other DNA; note = Description of Artificial Sequence: Synthetic oligonucleotide
aaaataaaagactagtgaca

SEQ ID NO: 24884 - DNA, 20 bp, synthetic construct
  source 1..20: mol_type = other DNA; note = Description of Artificial Sequence: Synthetic oligonucleotide
aaaaataaaagactagtgac

SEQ ID NO: 24885 - DNA, 20 bp, synthetic construct
  source 1..20: mol_type = other DNA; note = Description of Artificial Sequence: Synthetic oligonucleotide
aaaaaataaaagactagtga

SEQ ID NO: 24886 - DNA, 20 bp, synthetic construct
  source 1..20: mol_type = other DNA; note = Description of Artificial Sequence: Synthetic oligonucleotide
gaaaaaataaaagactagtg

SEQ ID NO: 24887 - DNA, 20 bp, synthetic construct
  source 1..20: mol_type = other DNA; note = Description of Artificial Sequence: Synthetic oligonucleotide
ggaaaaaataaaagactagt

SEQ ID NO: 24888 - DNA, 20 bp, synthetic construct
  source 1..20: mol_type = other DNA; note = Description of Artificial Sequence: Synthetic oligonucleotide
gggaaaaaataaaagactag

SEQ ID NO: 24889 - DNA, 20 bp, synthetic construct
  source 1..20: mol_type = other DNA; note = Description of Artificial Sequence: Synthetic oligonucleotide
ggggaaaaaataaaagacta

SEQ ID NO: 24890 - DNA, 20 bp, synthetic construct
  source 1..20: mol_type = other DNA; note = Description of Artificial Sequence: Synthetic oligonucleotide
aggggaaaaaataaaagact

SEQ ID NO: 24891 - DNA, 20 bp, synthetic construct
  source 1..20: mol_type = other DNA; note = Description of Artificial Sequence: Synthetic oligonucleotide
gaggggaaaaaataaaagac

SEQ ID NO: 24892 - DNA, 20 bp, synthetic construct
  source 1..20: mol_type = other DNA; note = Description of Artificial Sequence: Synthetic oligonucleotide
agaggggaaaaaataaaaga

SEQ ID NO: 24893 - DNA, 20 bp, synthetic construct
  source 1..20: mol_type = other DNA; note = Description of Artificial Sequence: Synthetic oligonucleotide
aagaggggaaaaaataaaag

SEQ ID NO: 24894 - DNA, 20 bp, synthetic construct
  source 1..20: mol_type = other DNA; note = Description of Artificial Sequence: Synthetic oligonucleotide
caagaggggaaaaaataaaa

SEQ ID NO: 24895 - DNA, 20 bp, synthetic construct
  source 1..20: mol_type = other DNA; note = Description of Artificial Sequence: Synthetic oligonucleotide
tcaagaggggaaaaaataaa

SEQ ID NO: 24896 - DNA, 20 bp, synthetic construct
  source 1..20: mol_type = other DNA; note = Description of Artificial Sequence: Synthetic oligonucleotide
ttcaagaggggaaaaaataa

SEQ ID NO: 24897 - DNA, 20 bp, synthetic construct
  source 1..20: mol_type = other DNA; note = Description of Artificial Sequence: Synthetic oligonucleotide
gttcaagaggggaaaaaata

SEQ ID NO: 24898 - DNA, 20 bp, synthetic construct
  source 1..20: mol_type = other DNA; note = Description of Artificial Sequence: Synthetic oligonucleotide
agttcaagaggggaaaaaat

SEQ ID NO: 24899 - DNA, 20 bp, synthetic construct
  source 1..20: mol_type = other DNA; note = Description of Artificial Sequence: Synthetic oligonucleotide
aagttcaagaggggaaaaaa

SEQ ID NO: 24900 - DNA, 20 bp, synthetic construct
  source 1..20: mol_type = other DNA; note = Description of Artificial Sequence: Synthetic oligonucleotide
aaagttcaagaggggaaaaa

SEQ ID NO: 24901 - DNA, 20 bp, synthetic construct
  source 1..20: mol_type = other DNA; note = Description of Artificial Sequence: Synthetic oligonucleotide
gaaagttcaagaggggaaaa

SEQ ID NO: 24902 - DNA, 20 bp, synthetic construct
  source 1..20: mol_type = other DNA; note = Description of Artificial Sequence: Synthetic oligonucleotide
ggaaagttcaagaggggaaa

SEQ ID NO: 24903 - DNA, 20 bp, synthetic construct
  source 1..20: mol_type = other DNA; note = Description of Artificial Sequence: Synthetic oligonucleotide
aggaaagttcaagaggggaa

SEQ ID NO: 24904 - DNA, 20 bp, synthetic construct
  source 1..20: mol_type = other DNA; note = Description of Artificial Sequence: Synthetic oligonucleotide
gaggaaagttcaagagggga

SEQ ID NO: 24905 - DNA, 20 bp, synthetic construct
  source 1..20: mol_type = other DNA; note = Description of Artificial Sequence: Synthetic oligonucleotide
tgaggaaagttcaagagggg

SEQ ID NO: 24906 - DNA, 20 bp, synthetic construct
  source 1..20: mol_type = other DNA; note = Description of Artificial Sequence: Synthetic oligonucleotide
gtgaggaaagttcaagaggg

SEQ ID NO: 24907 - DNA, 20 bp, synthetic construct
  source 1..20: mol_type = other DNA; note = Description of Artificial Sequence: Synthetic oligonucleotide
tgtgaggaaagttcaagagg

SEQ ID NO: 24908 - DNA, 20 bp, synthetic construct
  source 1..20: mol_type = other DNA; note = Description of Artificial Sequence: Synthetic oligonucleotide
gtgtgaggaaagttcaagag

SEQ ID NO: 24909 - DNA, 20 bp, synthetic construct
  source 1..20: mol_type = other DNA; note = Description of Artificial Sequence: Synthetic oligonucleotide
ggtgtgaggaaagttcaaga

SEQ ID NO: 24910 - DNA, 20 bp, synthetic construct
  source 1..20: mol_type = other DNA; note = Description of Artificial Sequence: Synthetic oligonucleotide
aggtgtgaggaaagttcaag

SEQ ID NO: 24911 - DNA, 20 bp, synthetic construct
  source 1..20: mol_type = other DNA; note = Description of Artificial Sequence: Synthetic oligonucleotide
caggtgtgaggaaagttcaa

SEQ ID NO: 24912 - DNA, 20 bp, synthetic construct
  source 1..20: mol_type = other DNA; note = Description of Artificial Sequence: Synthetic oligonucleotide
ccaggtgtgaggaaagttca

SEQ ID NO: 24913 - DNA, 20 bp, synthetic construct
  source 1..20: mol_type = other DNA; note = Description of Artificial Sequence: Synthetic oligonucleotide
tccaggtgtgaggaaagttc

SEQ ID NO: 24914 - DNA, 20 bp, synthetic construct
  source 1..20: mol_type = other DNA; note = Description of Artificial Sequence: Synthetic oligonucleotide
ttccaggtgtgaggaaagtt

SEQ ID NO: 24915 - DNA, 20 bp, synthetic construct
  source 1..20: mol_type = other DNA; note = Description of Artificial Sequence: Synthetic oligonucleotide
cttccaggtgtgaggaaagt

SEQ ID NO: 24916 - DNA, 20 bp, synthetic construct
  source 1..20: mol_type = other DNA; note = Description of Artificial Sequence: Synthetic oligonucleotide
tcttccaggtgtgaggaaag

SEQ ID NO: 24917 - DNA, 20 bp, synthetic construct
  source 1..20: mol_type = other DNA; note = Description of Artificial Sequence: Synthetic oligonucleotide
ttcttccaggtgtgaggaaa

SEQ ID NO: 24918 - DNA, 20 bp, synthetic construct
  source 1..20: mol_type = other DNA; note = Description of Artificial Sequence: Synthetic oligonucleotide
tttcttccaggtgtgaggaa

SEQ ID NO: 24919 - DNA, 20 bp, synthetic construct
  source 1..20: mol_type = other DNA; note = Description of Artificial Sequence: Synthetic oligonucleotide
gtttcttccaggtgtgagga

SEQ ID NO: 24920 - DNA, 20 bp, synthetic construct
  source 1..20: mol_type = other DNA; note = Description of Artificial Sequence: Synthetic oligonucleotide
tgtttcttccaggtgtgagg

SEQ ID NO: 24921 - DNA, 20 bp, synthetic construct
  source 1..20: mol_type = other DNA; note = Description of Artificial Sequence: Synthetic oligonucleotide
ttgtttcttccaggtgtgag

SEQ ID NO: 24922 - DNA, 20 bp, synthetic construct
  source 1..20: mol_type = other DNA; note = Description of Artificial Sequence: Synthetic oligonucleotide
tttgtttcttccaggtgtga

SEQ ID NO: 24923 - DNA, 20 bp, synthetic construct
  source 1..20: mol_type = other DNA; note = Description of Artificial Sequence: Synthetic oligonucleotide
ctttgtttcttccaggtgtg

SEQ ID NO: 24924 - DNA, 20 bp, synthetic construct
  source 1..20: mol_type = other DNA; note = Description of Artificial Sequence: Synthetic oligonucleotide
actttgtttcttccaggtgt

SEQ ID NO: 24925 - DNA, 20 bp, synthetic construct
  source 1..20: mol_type = other DNA; note = Description of Artificial Sequence: Synthetic oligonucleotide
tactttgtttcttccaggtg

SEQ ID NO: 24926 - DNA, 20 bp, synthetic construct
  source 1..20: mol_type = other DNA; note = Description of Artificial Sequence: Synthetic oligonucleotide
ctactttgtttcttccaggt

SEQ ID NO: 24927 - DNA, 20 bp, synthetic construct
  source 1..20: mol_type = other DNA; note = Description of Artificial Sequence: Synthetic oligonucleotide
cctactttgtttcttccagg

SEQ ID NO: 24928 - DNA, 20 bp, synthetic construct
  source 1..20: mol_type = other DNA; note = Description of Artificial Sequence: Synthetic oligonucleotide
tcctactttgtttcttccag

SEQ ID NO: 24929 - DNA, 20 bp, synthetic construct
  source 1..20: mol_type = other DNA; note = Description of Artificial Sequence: Synthetic oligonucleotide
ttcctactttgtttcttcca

SEQ ID NO: 24930 - DNA, 20 bp, synthetic construct
  source 1..20: mol_type = other DNA; note = Description of Artificial Sequence: Synthetic oligonucleotide
tttcctactttgtttcttcc

SEQ ID NO: 24931 - DNA, 20 bp, synthetic construct
  source 1..20: mol_type = other DNA; note = Description of Artificial Sequence: Synthetic oligonucleotide
ttttcctactttgtttcttc

SEQ ID NO: 24932 - DNA, 20 bp, synthetic construct
  source 1..20: mol_type = other DNA; note = Description of Artificial Sequence: Synthetic oligonucleotide
tttttcctactttgtttctt

SEQ ID NO: 24933 - DNA, 20 bp, synthetic construct
  source 1..20: mol_type = other DNA; note = Description of Artificial Sequence: Synthetic oligonucleotide
ctttttcctactttgtttct

SEQ ID NO: 24934 - DNA, 20 bp, synthetic construct
  source 1..20: mol_type = other DNA; note = Description of Artificial Sequence: Synthetic oligonucleotide
actttttcctactttgtttc

SEQ ID NO: 24935 - DNA, 20 bp, synthetic construct
  source 1..20: mol_type = other DNA; note = Description of Artificial Sequence: Synthetic oligonucleotide
cactttttcctactttgttt

SEQ ID NO: 24936 - DNA, 20 bp, synthetic construct
  source 1..20: mol_type = other DNA; note = Description of Artificial Sequence: Synthetic oligonucleotide
tcactttttcctactttgtt

SEQ ID NO: 24937 - DNA, 20 bp, synthetic construct
  source 1..20: mol_type = other DNA; note = Description of Artificial Sequence: Synthetic oligonucleotide
ttcactttttcctactttgt

SEQ ID NO: 24938 - DNA, 20 bp, synthetic construct
  source 1..20: mol_type = other DNA; note = Description of Artificial Sequence: Synthetic oligonucleotide
gttcactttttcctactttg

SEQ ID NO: 24939 - DNA, 20 bp, synthetic construct
  source 1..20: mol_type = other DNA; note = Description of Artificial Sequence: Synthetic oligonucleotide
tgttcactttttcctacttt

SEQ ID NO: 24940 - DNA, 20 bp, synthetic construct
  source 1..20: mol_type = other DNA; note = Description of Artificial Sequence: Synthetic oligonucleotide
ctgttcactttttcctactt

SEQ ID NO: 24941 - DNA, 20 bp, synthetic construct
  source 1..20: mol_type = other DNA; note = Description of Artificial Sequence: Synthetic oligonucleotide
cctgttcactttttcctact

SEQ ID NO: 24942 - DNA, 20 bp, synthetic construct
  source 1..20: mol_type = other DNA; note = Description of Artificial Sequence: Synthetic oligonucleotide
ccctgttcactttttcctac

SEQ ID NO: 24943 - DNA, 20 bp, synthetic construct
  source 1..20: mol_type = other DNA; note = Description of Artificial Sequence: Synthetic oligonucleotide
cccctgttcactttttccta

SEQ ID NO: 24944 - DNA, 20 bp, synthetic construct
  source 1..20: mol_type = other DNA; note = Description of Artificial Sequence: Synthetic oligonucleotide
tcccctgttcactttttcct

SEQ ID NO: 24945 - DNA, 20 bp, synthetic construct
  source 1..20: mol_type = other DNA; note = Description of Artificial Sequence: Synthetic oligonucleotide
atcccctgttcactttttcc

SEQ ID NO: 24946 - DNA, 20 bp, synthetic construct
  source 1..20: mol_type = other DNA; note = Description of Artificial Sequence: Synthetic oligonucleotide
catcccctgttcactttttc

SEQ ID NO: 24947 - DNA, 20 bp, synthetic construct
  source 1..20: mol_type = other DNA; note = Description of Artificial Sequence: Synthetic oligonucleotide
acatcccctgttcacttttt

SEQ ID NO: 24948 - DNA, 20 bp, synthetic construct
  source 1..20: mol_type = other DNA; note = Description of Artificial Sequence: Synthetic oligonucleotide
gacatcccctgttcactttt

SEQ ID NO: 24949 - DNA, 20 bp, synthetic construct
  source 1..20: mol_type = other DNA; note = Description of Artificial Sequence: Synthetic oligonucleotide
tgacatcccctgttcacttt

SEQ ID NO: 24950 - DNA, 20 bp, synthetic construct
  source 1..20: mol_type = other DNA; note = Description of Artificial Sequence: Synthetic oligonucleotide
ttgacatcccctgttcactt

SEQ ID NO: 24951 - DNA, 20 bp, synthetic construct
  source 1..20: mol_type = other DNA; note = Description of Artificial Sequence: Synthetic oligonucleotide
tttgacatcccctgttcact

SEQ ID NO: 24952 - DNA, 20 bp, synthetic construct
  source 1..20: mol_type = other DNA; note = Description of Artificial Sequence: Synthetic oligonucleotide
atttgacatcccctgttcac

SEQ ID NO: 24953 - DNA, 20 bp, synthetic construct
  source 1..20: mol_type = other DNA; note = Description of Artificial Sequence: Synthetic oligonucleotide
gatttgacatcccctgttca

SEQ ID NO: 24954 - DNA, 20 bp, synthetic construct
  source 1..20: mol_type = other DNA; note = Description of Artificial Sequence: Synthetic oligonucleotide
cgatttgacatcccctgttc

SEQ ID NO: 24955 - DNA, 20 bp, synthetic construct
  source 1..20: mol_type = other DNA; note = Description of Artificial Sequence: Synthetic oligonucleotide
tcgatttgacatcccctgtt

SEQ ID NO: 24956 - DNA, 20 bp, synthetic construct
  source 1..20: mol_type = other DNA; note = Description of Artificial Sequence: Synthetic oligonucleotide
atcgatttgacatcccctgt

SEQ ID NO: 24957 - DNA, 20 bp, synthetic construct
  source 1..20: mol_type = other DNA; note = Description of Artificial Sequence: Synthetic oligonucleotide
aatcgatttgacatcccctg

SEQ ID NO: 24958 - DNA, 20 bp, synthetic construct
  source 1..20: mol_type = other DNA; note = Description of Artificial Sequence: Synthetic oligonucleotide
gaatcgatttgacatcccct

SEQ ID NO: 24959 - DNA, 20 bp, synthetic construct
  source 1..20: mol_type = other DNA; note = Description of Artificial Sequence: Synthetic oligonucleotide
agaatcgatttgacatcccc

SEQ ID NO: 24960 - DNA, 20 bp, synthetic construct
  source 1..20: mol_type = other DNA; note = Description of Artificial Sequence: Synthetic oligonucleotide
aagaatcgatttgacatccc

SEQ ID NO: 24961 - DNA, 20 bp, synthetic construct
  source 1..20: mol_type = other DNA; note = Description of Artificial Sequence: Synthetic oligonucleotide
caagaatcgatttgacatcc

SEQ ID NO: 24962 - DNA, 20 bp, synthetic construct
  source 1..20: mol_type = other DNA; note = Description of Artificial Sequence: Synthetic oligonucleotide
tcaagaatcgatttgacatc

SEQ ID NO: 24963 - DNA, 20 bp, synthetic construct
  source 1..20: mol_type = other DNA; note = Description of Artificial Sequence: Synthetic oligonucleotide
ttcaagaatcgatttgacat

SEQ ID NO: 24964 - DNA, 20 bp, synthetic construct
  source 1..20: mol_type = other DNA; note = Description of Artificial Sequence: Synthetic oligonucleotide
attcaagaatcgatttgaca

SEQ ID NO: 24965 - DNA, 20 bp, synthetic construct
  source 1..20: mol_type = other DNA; note = Description of Artificial Sequence: Synthetic oligonucleotide
aattcaagaatcgatttgac

SEQ ID NO: 24966 - DNA, 20 bp, synthetic construct
  source 1..20: mol_type = other DNA; note = Description of Artificial Sequence: Synthetic oligonucleotide
gaattcaagaatcgatttga

SEQ ID NO: 24967 - DNA, 20 bp, synthetic construct
  source 1..20: mol_type = other DNA; note = Description of Artificial Sequence: Synthetic oligonucleotide
ggaattcaagaatcgatttg

SEQ ID NO: 24968 - DNA, 20 bp, synthetic construct
  source 1..20: mol_type = other DNA; note = Description of Artificial Sequence: Synthetic oligonucleotide
gggaattcaagaatcgattt

SEQ ID NO: 24969 - DNA, 20 bp, synthetic construct
  source 1..20: mol_type = other DNA; note = Description of Artificial Sequence: Synthetic oligonucleotide
cgggaattcaagaatcgatt

SEQ ID NO: 24970 - DNA, 20 bp, synthetic construct
  source 1..20: mol_type = other DNA; note = Description of Artificial Sequence: Synthetic oligonucleotide
gcgggaattcaagaatcgat

SEQ ID NO: 24971 - DNA, 20 bp, synthetic construct
  source 1..20: mol_type = other DNA; note = Description of Artificial Sequence: Synthetic oligonucleotide
agcgggaattcaagaatcga

SEQ ID NO: 24972 - DNA, 20 bp, synthetic construct
  source 1..20: mol_type = other DNA; note = Description of Artificial Sequence: Synthetic oligonucleotide
cagcgggaattcaagaatcg

SEQ ID NO: 24973 - DNA, 20 bp, synthetic construct
  source 1..20: mol_type = other DNA; note = Description of Artificial Sequence: Synthetic oligonucleotide
gcagcgggaattcaagaatc

SEQ ID NO: 24974 - DNA, 20 bp, synthetic construct
  source 1..20: mol_type = other DNA; note = Description of Artificial Sequence: Synthetic oligonucleotide
tgcagcgggaattcaagaat

SEQ ID NO: 24975 - DNA, 20 bp, synthetic construct
  source 1..20: mol_type = other DNA; note = Description of Artificial Sequence: Synthetic oligonucleotide
ttgcagcgggaattcaagaa

SEQ ID NO: 24976 - DNA, 20 bp, synthetic construct
  source 1..20: mol_type = other DNA; note = Description of Artificial Sequence: Synthetic oligonucleotide
cttgcagcgggaattcaaga

SEQ ID NO: 24977 - DNA, 20 bp, synthetic construct
  source 1..20: mol_type = other DNA; note = Description of Artificial Sequence: Synthetic oligonucleotide
gcttgcagcgggaattcaag

SEQ ID NO: 24978 - DNA, 20 bp, synthetic construct
  source 1..20: mol_type = other DNA; note = Description of Artificial Sequence: Synthetic oligonucleotide
agcttgcagcgggaattcaa

SEQ ID NO: 24979 - DNA, 20 bp, synthetic construct
  source 1..20: mol_type = other DNA; note = Description of Artificial Sequence: Synthetic oligonucleotide
tagcttgcagcgggaattca

SEQ ID NO: 24980 - DNA, 20 bp, synthetic construct
  source 1..20: mol_type = other DNA; note = Description of Artificial Sequence: Synthetic oligonucleotide
ctagcttgcagcgggaattc

SEQ ID NO: 24981 - DNA, 20 bp, synthetic construct
  source 1..20: mol_type = other DNA; note = Description of Artificial Sequence: Synthetic oligonucleotide
tctagcttgcagcgggaatt

SEQ ID NO: 24982 - DNA, 20 bp, synthetic construct
  source 1..20: mol_type = other DNA; note = Description of Artificial Sequence: Synthetic oligonucleotide
ctctagcttgcagcgggaat

SEQ ID NO: 24983 - DNA, 20 bp, synthetic construct
  source 1..20: mol_type = other DNA; note = Description of Artificial Sequence: Synthetic oligonucleotide
gctctagcttgcagcgggaa

SEQ ID NO: 24984 - DNA, 20 bp, synthetic construct
  source 1..20: mol_type = other DNA; note = Description of Artificial Sequence: Synthetic oligonucleotide
ggctctagcttgcagcggga

SEQ ID NO: 24985 - DNA, 20 bp, synthetic construct
  source 1..20: mol_type = other DNA; note = Description of Artificial Sequence: Synthetic oligonucleotide
cggctctagcttgcagcggg

SEQ ID NO: 24986 - DNA, 20 bp, synthetic construct
  source 1..20: mol_type = other DNA; note = Description of Artificial Sequence: Synthetic oligonucleotide
gcggctctagcttgcagcgg

SEQ ID NO: 24987 - DNA, 20 bp, synthetic construct
  source 1..20: mol_type = other DNA; note = Description of Artificial Sequence: Synthetic oligonucleotide
tgcggctctagcttgcagcg

SEQ ID NO: 24988 - DNA, 20 bp, synthetic construct
  source 1..20: mol_type = other DNA; note = Description of Artificial Sequence: Synthetic oligonucleotide
ctgcggctctagcttgcagc

SEQ ID NO: 24989 - DNA, 20 bp, synthetic construct
  source 1..20: mol_type = other DNA; note = Description of Artificial Sequence: Synthetic oligonucleotide
cctgcggctctagcttgcag

SEQ ID NO: 24990 - DNA, 20 bp, synthetic construct
  source 1..20: mol_type = other DNA; note = Description of Artificial Sequence: Synthetic oligonucleotide
gcctgcggctctagcttgca

SEQ ID NO: 24991 - DNA, 20 bp, synthetic construct
  source 1..20: mol_type = other DNA; note = Description of Artificial Sequence: Synthetic oligonucleotide
tgcctgcggctctagcttgc

SEQ ID NO: 24992 - DNA, 20 bp, synthetic construct
  source 1..20: mol_type = other DNA; note = Description of Artificial Sequence: Synthetic oligonucleotide
gtgcctgcggctctagcttg

SEQ ID NO: 24993 - DNA, 20 bp, synthetic construct
  source 1..20: mol_type = other DNA; note = Description of Artificial Sequence: Synthetic oligonucleotide
ggtgcctgcggctctagctt

SEQ ID NO: 24994 - DNA, 20 bp, synthetic construct
  source 1..20: mol_type = other DNA; note = Description of Artificial Sequence: Synthetic oligonucleotide
gggtgcctgcggctctagct

SEQ ID NO: 24995 - DNA, 20 bp, synthetic construct
  source 1..20: mol_type = other DNA; note = Description of Artificial Sequence: Synthetic oligonucleotide
agggtgcctgcggctctagc

SEQ ID NO: 24996 - DNA, 20 bp, synthetic construct
  source 1..20: mol_type = other DNA; note = Description of Artificial Sequence: Synthetic oligonucleotide
gagggtgcctgcggctctag

SEQ ID NO: 24997 - DNA, 20 bp, synthetic construct
  source 1..20: mol_type = other DNA; note = Description of Artificial Sequence: Synthetic oligonucleotide
agagggtgcctgcggctcta

SEQ ID NO: 24998 - DNA, 20 bp, synthetic construct
  source 1..20: mol_type = other DNA; note = Description of Artificial Sequence: Synthetic oligonucleotide
gagagggtgcctgcggctct

SEQ ID NO: 24999 - DNA, 20 bp, synthetic construct
  source 1..20: mol_type = other DNA; note = Description of Artificial Sequence: Synthetic oligonucleotide
tgagagggtgcctgcggctc

SEQ ID NO: 25000 - DNA, 20 bp, synthetic construct
  source 1..20: mol_type = other DNA; note = Description of Artificial Sequence: Synthetic oligonucleotide
gtgagagggtgcctgcggct

SEQ ID NO: 25001 - DNA, 20 bp, synthetic construct
  source 1..20: mol_type = other DNA; note = Description of Artificial Sequence: Synthetic oligonucleotide
agtgagagggtgcctgcggc

SEQ ID NO: 25002 - DNA, 20 bp, synthetic construct
  source 1..20: mol_type = other DNA; note = Description of Artificial Sequence: Synthetic oligonucleotide
gagtgagagggtgcctgcgg

SEQ ID NO: 25003 - DNA, 20 bp, synthetic construct
  source 1..20: mol_type = other DNA; note = Description of Artificial Sequence: Synthetic oligonucleotide
tgagtgagagggtgcctgcg

SEQ ID NO: 25004 - DNA, 20 bp, synthetic construct
  source 1..20: mol_type = other DNA; note = Description of Artificial Sequence: Synthetic oligonucleotide
ttgagtgagagggtgcctgc

SEQ ID NO: 25005 - DNA, 20 bp, synthetic construct
  source 1..20: mol_type = other DNA; note = Description of Artificial Sequence: Synthetic oligonucleotide
attgagtgagagggtgcctg

SEQ ID NO: 25006 - DNA, 20 bp, synthetic construct
  source 1..20: mol_type = other DNA; note = Description of Artificial Sequence: Synthetic oligonucleotide
aattgagtgagagggtgcct

SEQ ID NO: 25007 - DNA, 20 bp, synthetic construct
  source 1..20: mol_type = other DNA; note = Description of Artificial Sequence: Synthetic oligonucleotide
aaattgagtgagagggtgcc

SEQ ID NO: 25008 - DNA, 20 bp, synthetic construct
  source 1..20: mol_type = other DNA; note = Description of Artificial Sequence: Synthetic oligonucleotide
gaaattgagtgagagggtgc

SEQ ID NO: 25009 - DNA, 20 bp, synthetic construct
  source 1..20: mol_type = other DNA; note = Description of Artificial Sequence: Synthetic oligonucleotide
ggaaattgagtgagagggtg

SEQ ID NO: 25010 - DNA, 20 bp, synthetic construct
  source 1..20: mol_type = other DNA; note = Description of Artificial Sequence: Synthetic oligonucleotide
tggaaattgagtgagagggt

SEQ ID NO: 25011 - DNA, 20 bp, synthetic construct
  source 1..20: mol_type = other DNA; note = Description of Artificial Sequence: Synthetic oligonucleotide
gtggaaattgagtgagaggg

SEQ ID NO: 25012 - DNA, 20 bp, synthetic construct
  source 1..20: mol_type = other DNA; note = Description of Artificial Sequence: Synthetic oligonucleotide
agtggaaattgagtgagagg

SEQ ID NO: 25013 - DNA, 20 bp, synthetic construct
  source 1..20: mol_type = other DNA; note = Description of Artificial Sequence: Synthetic oligonucleotide
gagtggaaattgagtgagag

SEQ ID NO: 25014 - DNA, 20 bp, synthetic construct
  source 1..20: mol_type = other DNA; note = Description of Artificial Sequence: Synthetic oligonucleotide
tgagtggaaattgagtgaga

SEQ ID NO: 25015 - DNA, 20 bp, synthetic construct
  source 1..20: mol_type = other DNA; note = Description of Artificial Sequence: Synthetic oligonucleotide
ctgagtggaaattgagtgag

SEQ ID NO: 25016 - DNA, 20 bp, synthetic construct
  source 1..20: mol_type = other DNA; note = Description of Artificial Sequence: Synthetic oligonucleotide
tctgagtggaaattgagtga

SEQ ID NO: 25017 - DNA, 20 bp, synthetic construct
  source 1..20: mol_type = other DNA; note = Description of Artificial Sequence: Synthetic oligonucleotide
ttctgagtggaaattgagtg

SEQ ID NO: 25018 - DNA, 20 bp, synthetic construct
  source 1..20: mol_type = other DNA; note = Description of Artificial Sequence: Synthetic oligonucleotide
gttctgagtggaaattgagt

SEQ ID NO: 25019 - DNA, 20 bp, synthetic construct
  source 1..20: mol_type = other DNA; note = Description of Artificial Sequence: Synthetic oligonucleotide
ggttctgagtggaaattgag

SEQ ID NO: 25020 - DNA, 20 bp, synthetic construct
  source 1..20: mol_type = other DNA; note = Description of Artificial Sequence: Synthetic oligonucleotide
gggttctgagtggaaattga

SEQ ID NO: 25021 - DNA, 20 bp, synthetic construct
  source 1..20: mol_type = other DNA; note = Description of Artificial Sequence: Synthetic oligonucleotide
agggttctgagtggaaattg

SEQ ID NO: 25022 - DNA, 20 bp, synthetic construct
  source 1..20: mol_type = other DNA; note = Description of Artificial Sequence: Synthetic oligonucleotide
tagggttctgagtggaaatt

SEQ ID NO: 25023 - DNA, 20 bp, synthetic construct
  source 1..20: mol_type = other DNA; note = Description of Artificial Sequence: Synthetic oligonucleotide
atagggttctgagtggaaat

SEQ ID NO: 25024 - DNA, 20 bp, synthetic construct
  source 1..20: mol_type = other DNA; note = Description of Artificial Sequence: Synthetic oligonucleotide
tatagggttctgagtggaaa

SEQ ID NO: 25025 - DNA, 20 bp, synthetic construct
  source 1..20: mol_type = other DNA; note = Description of Artificial Sequence: Synthetic oligonucleotide
ttatagggttctgagtggaa

SEQ ID NO: 25026 - DNA, 20 bp, synthetic construct
  source 1..20: mol_type = other DNA; note = Description of Artificial Sequence: Synthetic oligonucleotide
tttatagggttctgagtgga

SEQ ID NO: 25027 - DNA, 20 bp, synthetic construct
  source 1..20: mol_type = other DNA; note = Description of Artificial Sequence: Synthetic oligonucleotide
gtttatagggttctgagtgg

SEQ ID NO: 25028 - DNA, 20 bp, synthetic construct
  source 1..20: mol_type = other DNA; note = Description of Artificial Sequence: Synthetic oligonucleotide
tgtttatagggttctgagtg

SEQ ID NO: 25029 - DNA, 20 bp, synthetic construct
  source 1..20: mol_type = other DNA; note = Description of Artificial Sequence: Synthetic oligonucleotide
gtgtttatagggttctgagt

SEQ ID NO: 25030 - DNA, 20 bp, synthetic construct
  source 1..20: mol_type = other DNA; note = Description of Artificial Sequence: Synthetic oligonucleotide
ggtgtttatagggttctgag

SEQ ID NO: 25031 - DNA, 20 bp, synthetic construct
  source 1..20: mol_type = other DNA; note = Description of Artificial Sequence: Synthetic oligonucleotide
tggtgtttatagggttctga

SEQ ID NO: 25032 - DNA, 20 bp, synthetic construct
  source 1..20: mol_type = other DNA; note = Description of Artificial Sequence: Synthetic oligonucleotide
ctggtgtttatagggttctg

SEQ ID NO: 25033 - DNA, 20 bp, synthetic construct
  source 1..20: mol_type = other DNA; note = Description of Artificial Sequence: Synthetic oligonucleotide
actggtgtttatagggttct

SEQ ID NO: 25034 - DNA, 20 bp, synthetic construct
  source 1..20: mol_type = other DNA; note = Description of Artificial Sequence: Synthetic oligonucleotide
cactggtgtttatagggttc

SEQ ID NO: 25035 - DNA, 20 bp, synthetic construct
  source 1..20: mol_type = other DNA; note = Description of Artificial Sequence: Synthetic oligonucleotide
ccactggtgtttatagggtt

SEQ ID NO: 25036 - DNA, 20 bp, synthetic construct
  source 1..20: mol_type = other DNA; note = Description of Artificial Sequence: Synthetic oligonucleotide
cccactggtgtttatagggt

SEQ ID NO: 25037 - DNA, 20 bp, synthetic construct
  source 1..20: mol_type = other DNA; note = Description of Artificial Sequence: Synthetic oligonucleotide
tcccactggtgtttataggg

SEQ ID NO: 25038 - DNA, 20 bp, synthetic construct
  source 1..20: mol_type = other DNA; note = Description of Artificial Sequence: Synthetic oligonucleotide
ttcccactggtgtttatagg

SEQ ID NO: 25039 - DNA, 20 bp, synthetic construct
  source 1..20: mol_type = other DNA; note = Description of Artificial Sequence: Synthetic oligonucleotide
cttcccactggtgtttatag

SEQ ID NO: 25040 - DNA, 20 bp, synthetic construct
  source 1..20: mol_type = other DNA; note = Description of Artificial Sequence: Synthetic oligonucleotide
ccttcccactggtgtttata

SEQ ID NO: 25041 - DNA, 20 bp, synthetic construct
  source 1..20: mol_type = other DNA; note = Description of Artificial Sequence: Synthetic oligonucleotide
cccttcccactggtgtttat

SEQ ID NO: 25042 - DNA, 20 bp, synthetic construct
  source 1..20: mol_type = other DNA; note = Description of Artificial Sequence: Synthetic oligonucleotide
gcccttcccactggtgttta

SEQ ID NO: 25043 - DNA, 20 bp, synthetic construct
  source 1..20: mol_type = other DNA; note = Description of Artificial Sequence: Synthetic oligonucleotide
tgcccttcccactggtgttt

SEQ ID NO: 25044 - DNA, 20 bp, synthetic construct
  source 1..20: mol_type = other DNA; note = Description of Artificial Sequence: Synthetic oligonucleotide
ttgcccttcccactggtgtt

SEQ ID NO: 25045 - DNA, 20 bp, synthetic construct
  source 1..20: mol_type = other DNA; note = Description of Artificial Sequence: Synthetic oligonucleotide
gttgcccttcccactggtgt

SEQ ID NO: 25046 - DNA, 20 bp, synthetic construct
  source 1..20: mol_type = other DNA; note = Description of Artificial Sequence: Synthetic oligonucleotide
ggttgcccttcccactggtg

SEQ ID NO: 25047 - DNA, 20 bp, synthetic construct
  source 1..20: mol_type = other DNA; note = Description of Artificial Sequence: Synthetic oligonucleotide
gggttgcccttcccactggt

SEQ ID NO: 25048 - DNA, 20 bp, synthetic construct
  source 1..20: mol_type = other DNA; note = Description of Artificial Sequence: Synthetic oligonucleotide
tgggttgcccttcccactgg

SEQ ID NO: 25049 - DNA, 20 bp, synthetic construct
  source 1..20: mol_type = other DNA; note = Description of Artificial Sequence: Synthetic oligonucleotide
gtgggttgcccttcccactg

SEQ ID NO: 25050 - DNA, 20 bp, synthetic construct
  source 1..20: mol_type = other DNA; note = Description of Artificial Sequence: Synthetic oligonucleotide
agtgggttgcccttcccact

SEQ ID NO: 25051 - DNA, 20 bp, synthetic construct
  source 1..20: mol_type = other DNA; note = Description of Artificial Sequence: Synthetic oligonucleotide
cagtgggttgcccttcccac

SEQ ID NO: 25052 - DNA, 20 bp, synthetic construct
  source 1..20: mol_type = other DNA; note = Description of Artificial Sequence: Synthetic oligonucleotide
gcagtgggttgcccttccca

SEQ ID NO: 25053 - DNA, 20 bp, synthetic construct
  source 1..20: mol_type = other DNA; note = Description of Artificial Sequence: Synthetic oligonucleotide
tgcagtgggttgcccttccc

SEQ ID NO: 25054 - DNA, 20 bp, synthetic construct
  source 1..20: mol_type = other DNA; note = Description of Artificial Sequence: Synthetic oligonucleotide
gtgcagtgggttgcccttcc

SEQ ID NO: 25055 - DNA, 20 bp, synthetic construct
  source 1..20: mol_type = other DNA; note = Description of Artificial Sequence: Synthetic oligonucleotide
cgtgcagtgggttgcccttc

SEQ ID NO: 25056 - DNA, 20 bp, synthetic construct
  source 1..20: mol_type = other DNA; note = Description of Artificial Sequence: Synthetic oligonucleotide
acgtgcagtgggttgccctt

SEQ ID NO: 25057 - DNA, 20 bp, synthetic construct
  source 1..20: mol_type = other DNA; note = Description of Artificial Sequence: Synthetic oligonucleotide
cacgtgcagtgggttgccct

SEQ ID NO: 25058 - DNA, 20 bp, synthetic construct
  source 1..20: mol_type = other DNA; note = Description of Artificial Sequence: Synthetic oligonucleotide
ccacgtgcagtgggttgccc

SEQ ID NO: 25059 - DNA, 20 bp, synthetic construct
  source 1..20: mol_type = other DNA; note = Description of Artificial Sequence: Synthetic oligonucleotide
cccacgtgcagtgggttgcc

SEQ ID NO: 25060 - DNA, 20 bp, synthetic construct
  source 1..20: mol_type = other DNA; note = Description of Artificial Sequence: Synthetic oligonucleotide
tcccacgtgcagtgggttgc

SEQ ID NO: 25061 - DNA, 20 bp, synthetic construct
  source 1..20: mol_type = other DNA; note = Description of Artificial Sequence: Synthetic oligonucleotide
ttcccacgtgcagtgggttg

SEQ ID NO: 25062 - DNA, 20 bp, synthetic construct
  source 1..20: mol_type = other DNA; note = Description of Artificial Sequence: Synthetic oligonucleotide
attcccacgtgcagtgggtt

SEQ ID NO: 25063 - DNA, 20 bp, synthetic construct
  source 1..20: mol_type = other DNA; note = Description of Artificial Sequence: Synthetic oligonucleotide
cattcccacgtgcagtgggt

SEQ ID NO: 25064 - DNA, 20 bp, synthetic construct
  source 1..20: mol_type = other DNA; note = Description of Artificial Sequence: Synthetic oligonucleotide
gcattcccacgtgcagtggg

SEQ ID NO: 25065 - DNA, 20 bp, synthetic construct
  source 1..20: mol_type = other DNA; note = Description of Artificial Sequence: Synthetic oligonucleotide
tgcattcccacgtgcagtgg

SEQ ID NO: 25066 - DNA, 20 bp, synthetic construct
  source 1..20: mol_type = other DNA; note = Description of Artificial Sequence: Synthetic oligonucleotide
gtgcattcccacgtgcagtg

SEQ ID NO: 25067 - DNA, 20 bp, synthetic construct
  source 1..20: mol_type = other DNA; note = Description of Artificial Sequence: Synthetic oligonucleotide
agtgcattcccacgtgcagt

SEQ ID NO: 25068 - DNA, 20 bp, synthetic construct
  source 1..20: mol_type = other DNA; note = Description of Artificial Sequence: Synthetic oligonucleotide
cagtgcattcccacgtgcag

SEQ ID NO: 25069 - DNA, 20 bp, synthetic construct
  source 1..20: mol_type = other DNA; note = Description of Artificial Sequence: Synthetic oligonucleotide
tcagtgcattcccacgtgca

SEQ ID NO: 25070 - DNA, 20 bp, synthetic construct
  source 1..20: mol_type = other DNA; note = Description of Artificial Sequence: Synthetic oligonucleotide
atcagtgcattcccacgtgc

SEQ ID NO: 25071 - DNA, 20 bp, synthetic construct
  source 1..20: mol_type = other DNA; note = Description of Artificial Sequence: Synthetic oligonucleotide
aatcagtgcattcccacgtg

SEQ ID NO: 25072 - DNA, 20 bp, synthetic construct
  source 1..20: mol_type = other DNA; note = Description of Artificial Sequence: Synthetic oligonucleotide
aaatcagtgcattcccacgt

SEQ ID NO: 25073 - DNA, 20 bp, synthetic construct
  source 1..20: mol_type = other DNA; note = Description of Artificial Sequence: Synthetic oligonucleotide
aaaatcagtgcattcccacg

SEQ ID NO: 25074 - DNA, 20 bp, synthetic construct
  source 1..20: mol_type = other DNA; note = Description of Artificial Sequence: Synthetic oligonucleotide
aaaaatcagtgcattcccac

SEQ ID NO: 25075 - DNA, 20 bp, synthetic construct
  source 1..20: mol_type = other DNA; note = Description of Artificial Sequence: Synthetic oligonucleotide
gaaaaatcagtgcattccca

SEQ ID NO: 25076 - DNA, 20 bp, synthetic construct
  source 1..20: mol_type = other DNA; note = Description of Artificial Sequence: Synthetic oligonucleotide
ggaaaaatcagtgcattccc

SEQ ID NO: 25077 - DNA, 20 bp, synthetic construct
  source 1..20: mol_type = other DNA; note = Description of Artificial Sequence: Synthetic oligonucleotide
aggaaaaatcagtgcattcc

SEQ ID NO: 25078 - DNA, 20 bp, synthetic construct
  source 1..20: mol_type = other DNA; note = Description of Artificial Sequence: Synthetic oligonucleotide
taggaaaaatcagtgcattc

SEQ ID NO: 25079 - DNA, 20 bp, synthetic construct
  source 1..20: mol_type = other DNA; note = Description of Artificial Sequence: Synthetic oligonucleotide
ctaggaaaaatcagtgcatt

SEQ ID NO: 25080 - DNA, 20 bp, synthetic construct
  source 1..20: mol_type = other DNA; note = Description of Artificial Sequence: Synthetic oligonucleotide
cctaggaaaaatcagtgcat

SEQ ID NO: 25081 - DNA, 20 bp, synthetic construct
  source 1..20: mol_type = other DNA; note = Description of Artificial Sequence: Synthetic oligonucleotide
tcctaggaaaaatcagtgca

SEQ ID NO: 25082 - DNA, 20 bp, synthetic construct
  source 1..20: mol_type = other DNA; note = Description of Artificial Sequence: Synthetic oligonucleotide
ctcctaggaaaaatcagtgc

SEQ ID NO: 25083 - DNA, 20 bp, synthetic construct
  source 1..20: mol_type = other DNA; note = Description of Artificial Sequence: Synthetic oligonucleotide
actcctaggaaaaatcagtg

SEQ ID NO: 25084 - DNA, 20 bp, synthetic construct
  source 1..20: mol_type = other DNA; note = Description of Artificial Sequence: Synthetic oligonucleotide
tactcctaggaaaaatcagt

SEQ ID NO: 25085 - DNA, 20 bp, synthetic construct
  source 1..20: mol_type = other DNA; note = Description of Artificial Sequence: Synthetic oligonucleotide
ctactcctaggaaaaatcag

SEQ ID NO: 25086 - DNA, 20 bp, synthetic construct
  source 1..20: mol_type = other DNA; note = Description of Artificial Sequence: Synthetic oligonucleotide
tctactcctaggaaaaatca

SEQ ID NO: 25087 - DNA, 20 bp, synthetic construct
  source 1..20: mol_type = other DNA; note = Description of Artificial Sequence: Synthetic oligonucleotide
gtctactcctaggaaaaatc

SEQ ID NO: 25088 - DNA, 20 bp, synthetic construct
  source 1..20: mol_type = other DNA; note = Description of Artificial Sequence: Synthetic oligonucleotide
tgtctactcctaggaaaaat

SEQ ID NO: 25089 - DNA, 20 bp, synthetic construct
  source 1..20: mol_type = other DNA; note = Description of Artificial Sequence: Synthetic oligonucleotide
atgtctactcctaggaaaaa

SEQ ID NO: 25090 - DNA, 20 bp, synthetic construct
  source 1..20: mol_type = other DNA; note = Description of Artificial Sequence: Synthetic oligonucleotide
catgtctactcctaggaaaa

SEQ ID NO: 25091 - DNA, 20 bp, synthetic construct
  source 1..20: mol_type = other DNA; note = Description of Artificial Sequence: Synthetic oligonucleotide
acatgtctactcctaggaaa

SEQ ID NO: 25092 - DNA, 20 bp, synthetic construct
  source 1..20: mol_type = other DNA; note = Description of Artificial Sequence: Synthetic oligonucleotide
aacatgtctactcctaggaa

SEQ ID NO: 25093 - DNA, 20 bp, synthetic construct
  source 1..20: mol_type = other DNA; note = Description of Artificial Sequence: Synthetic oligonucleotide
gaacatgtctactcctagga

SEQ ID NO: 25094 - DNA, 20 bp, synthetic construct
  source 1..20: mol_type = other DNA; note = Description of Artificial Sequence: Synthetic oligonucleotide
ggaacatgtctactcctagg

SEQ ID NO: 25095 - DNA, 20 bp, synthetic construct
  source 1..20: mol_type = other DNA; note = Description of Artificial Sequence: Synthetic oligonucleotide
aggaacatgtctactcctag

SEQ ID NO: 25096 - DNA, 20 bp, synthetic construct
  source 1..20: mol_type = other DNA; note = Description of Artificial Sequence: Synthetic oligonucleotide
gaggaacatgtctactccta

SEQ ID NO: 25097 - DNA, 20 bp, synthetic construct
  source 1..20: mol_type = other DNA; note = Description of Artificial Sequence: Synthetic oligonucleotide
agaggaacatgtctactcct

SEQ ID NO: 25098 - DNA, 20 bp, synthetic construct
  source 1..20: mol_type = other DNA; note = Description of Artificial Sequence: Synthetic oligonucleotide
tagaggaacatgtctactcc

SEQ ID NO: 25099 - DNA, 20 bp, synthetic construct
  source 1..20: mol_type = other DNA; note = Description of Artificial Sequence: Synthetic oligonucleotide
ttagaggaacatgtctactc

SEQ ID NO: 25100 - DNA, 20 bp, synthetic construct
  source 1..20: mol_type = other DNA; note = Description of Artificial Sequence: Synthetic oligonucleotide
attagaggaacatgtctact

SEQ ID NO: 25101 - DNA, 20 bp, synthetic construct
  source 1..20: mol_type = other DNA; note = Description of Artificial Sequence: Synthetic oligonucleotide
aattagaggaacatgtctac

SEQ ID NO: 25102 - DNA, 20 bp, synthetic construct
  source 1..20: mol_type = other DNA; note = Description of Artificial Sequence: Synthetic oligonucleotide
taattagaggaacatgtcta

SEQ ID NO: 25103 - DNA, 20 bp, synthetic construct
  source 1..20: mol_type = other DNA; note = Description of Artificial Sequence: Synthetic oligonucleotide
gtaattagaggaacatgtct

SEQ ID NO: 25104 - DNA, 20 bp, synthetic construct
  source 1..20: mol_type = other DNA; note = Description of Artificial Sequence: Synthetic oligonucleotide
agtaattagaggaacatgtc

SEQ ID NO: 25105 - DNA, 20 bp, synthetic construct
  source 1..20: mol_type = other DNA; note = Description of Artificial Sequence: Synthetic oligonucleotide
gagtaattagaggaacatgt

SEQ ID NO: 25106 - DNA, 20 bp, synthetic construct
  source 1..20: mol_type = other DNA; note = Description of Artificial Sequence: Synthetic oligonucleotide
ggagtaattagaggaacatg

SEQ ID NO: 25107 - DNA, 20 bp, synthetic construct
  source 1..20: mol_type = other DNA; note = Description of Artificial Sequence: Synthetic oligonucleotide
gggagtaattagaggaacat

SEQ ID NO: 25108 - DNA, 20 bp, synthetic construct
  source 1..20: mol_type = other DNA; note = Description of Artificial Sequence: Synthetic oligonucleotide
agggagtaattagaggaaca

SEQ ID NO: 25109 - DNA, 20 bp, synthetic construct
  source 1..20: mol_type = other DNA; note = Description of Artificial Sequence: Synthetic oligonucleotide
cagggagtaattagaggaac

SEQ ID NO: 25110 - DNA, 20 bp, synthetic construct
  source 1..20: mol_type = other DNA; note = Description of Artificial Sequence: Synthetic oligonucleotide
tcagggagtaattagaggaa

SEQ ID NO: 25111 - DNA, 20 bp, synthetic construct
  source 1..20: mol_type = other DNA; note = Description of Artificial Sequence: Synthetic oligonucleotide
ctcagggagtaattagagga

SEQ ID NO: 25112 - DNA, 20 bp, synthetic construct
  source 1..20: mol_type = other DNA; note = Description of Artificial Sequence: Synthetic oligonucleotide
cctcagggagtaattagagg

SEQ ID NO: 25113 - DNA, 20 bp, synthetic construct
  source 1..20: mol_type = other DNA; note = Description of Artificial Sequence: Synthetic oligonucleotide
ccctcagggagtaattagag

SEQ ID NO: 25114 - DNA, 20 bp, synthetic construct
  source 1..20: mol_type = other DNA; note = Description of Artificial Sequence: Synthetic oligonucleotide
accctcagggagtaattaga

SEQ ID NO: 25115 - DNA, 20 bp, synthetic construct
  source 1..20: mol_type = other DNA; note = Description of Artificial Sequence: Synthetic oligonucleotide
aaccctcagggagtaattag

SEQ ID NO: 25116 - DNA, 20 bp, synthetic construct
  source 1..20: mol_type = other DNA; note = Description of Artificial Sequence: Synthetic oligonucleotide
taaccctcagggagtaatta

SEQ ID NO: 25117 - DNA, 20 bp, synthetic construct
  source 1..20: mol_type = other DNA; note = Description of Artificial Sequence: Synthetic oligonucleotide
ctaaccctcagggagtaatt

SEQ ID NO: 25118 - DNA, 20 bp, synthetic construct
  source 1..20: mol_type = other DNA; note = Description of Artificial Sequence: Synthetic oligonucleotide
actaaccctcagggagtaat

SEQ ID NO: 25119 - DNA, 20 bp, synthetic construct
  source 1..20: mol_type = other DNA; note = Description of Artificial Sequence: Synthetic oligonucleotide
aactaaccctcagggagtaa

SEQ ID NO: 25120 - DNA, 20 bp, synthetic construct
  source 1..20: mol_type = other DNA; note = Description of Artificial Sequence: Synthetic oligonucleotide
caactaaccctcagggagta

SEQ ID NO: 25121 - DNA, 20 bp, synthetic construct
  source 1..20: mol_type = other DNA; note = Description of Artificial Sequence: Synthetic oligonucleotide
ccaactaaccctcagggagt

SEQ ID NO: 25122 - DNA, 20 bp, synthetic construct
  source 1..20: mol_type = other DNA; note = Description of Artificial Sequence: Synthetic oligonucleotide
cccaactaaccctcagggag

SEQ ID NO: 25123 - DNA, 20 bp, synthetic construct
  source 1..20: mol_type = other DNA; note = Description of Artificial Sequence: Synthetic oligonucleotide
ccccaactaaccctcaggga

SEQ ID NO: 25124 - DNA, 20 bp, synthetic construct
  source 1..20: mol_type = other DNA; note = Description of Artificial Sequence: Synthetic oligonucleotide
gccccaactaaccctcaggg

SEQ ID NO: 25125 - DNA, 20 bp, synthetic construct
  source 1..20: mol_type = other DNA; note = Description of Artificial Sequence: Synthetic oligonucleotide
agccccaactaaccctcagg

SEQ ID NO: 25126 - DNA, 20 bp, synthetic construct
  source 1..20: mol_type = other DNA; note = Description of Artificial Sequence: Synthetic oligonucleotide
tagccccaactaaccctcag

SEQ ID NO: 25127 - DNA, 20 bp, synthetic construct
  source 1..20: mol_type = other DNA; note = Description of Artificial Sequence: Synthetic oligonucleotide
ttagccccaactaaccctca

SEQ ID NO: 25128 - DNA, 20 bp, synthetic construct
  source 1..20: mol_type = other DNA; note = Description of Artificial Sequence: Synthetic oligonucleotide
tttagccccaactaaccctc

SEQ ID NO: 25129 - DNA, 20 bp, synthetic construct
  source 1..20: mol_type = other DNA; note = Description of Artificial Sequence: Synthetic oligonucleotide
gtttagccccaactaaccct

SEQ ID NO: 25130 - DNA, 20 bp, synthetic construct
  source 1..20: mol_type = other DNA; note = Description of Artificial Sequence: Synthetic oligonucleotide
ggtttagccccaactaaccc

SEQ ID NO: 25131 - DNA, 20 bp, synthetic construct
  source 1..20: mol_type = other DNA; note = Description of Artificial Sequence: Synthetic oligonucleotide
tggtttagccccaactaacc

SEQ ID NO: 25132 - DNA, 20 bp, synthetic construct
  source 1..20: mol_type = other DNA; note = Description of Artificial Sequence: Synthetic oligonucleotide
atggtttagccccaactaac

SEQ ID NO: 25133 - DNA, 20 bp, synthetic construct
  source 1..20: mol_type = other DNA; note = Description of Artificial Sequence: Synthetic oligonucleotide
catggtttagccccaactaa

SEQ ID NO: 25134 - DNA, 20 bp, synthetic construct
  source 1..20: mol_type = other DNA; note = Description of Artificial Sequence: Synthetic oligonucleotide
tcatggtttagccccaacta

SEQ ID NO: 25135 - DNA, 20 bp, synthetic construct
  source 1..20: mol_type = other DNA; note = Description of Artificial Sequence: Synthetic oligonucleotide
gtcatggtttagccccaact

SEQ ID NO: 25136 - DNA, 20 bp, synthetic construct
  source 1..20: mol_type = other DNA; note = Description of Artificial Sequence: Synthetic oligonucleotide
tgtcatggtttagccccaac

SEQ ID NO: 25137 - DNA, 20 bp, synthetic construct
  source 1..20: mol_type = other DNA; note = Description of Artificial Sequence: Synthetic oligonucleotide
ctgtcatggtttagccccaa

SEQ ID NO: 25138 - DNA, 20 bp, synthetic construct
  source 1..20: mol_type = other DNA; note = Description of Artificial Sequence: Synthetic oligonucleotide
tctgtcatggtttagcccca

SEQ ID NO: 25139 - DNA, 20 bp, synthetic construct
  source 1..20: mol_type = other DNA; note = Description of Artificial Sequence: Synthetic oligonucleotide
ttctgtcatggtttagcccc

SEQ ID NO: 25140 - DNA, 20 bp, synthetic construct
  source 1..20: mol_type = other DNA; note = Description of Artificial Sequence: Synthetic oligonucleotide
cttctgtcatggtttagccc

SEQ ID NO: 25141 - DNA, 20 bp, synthetic construct
  source 1..20: mol_type = other DNA; note = Description of Artificial Sequence: Synthetic oligonucleotide
acttctgtcatggtttagcc

SEQ ID NO: 25142 - DNA, 20 bp, synthetic construct
  source 1..20: mol_type = other DNA; note = Description of Artificial Sequence: Synthetic oligonucleotide
cacttctgtcatggtttagc

SEQ ID NO: 25143 - DNA, 20 bp, synthetic construct
  source 1..20: mol_type = other DNA; note = Description of Artificial Sequence: Synthetic oligonucleotide
ccacttctgtcatggtttag

SEQ ID NO: 25144 - DNA, 20 bp, synthetic construct
  source 1..20: mol_type = other DNA; note = Description of Artificial Sequence: Synthetic oligonucleotide
cccacttctgtcatggttta

SEQ ID NO: 25145 - DNA, 20 bp, synthetic construct
  source 1..20: mol_type = other DNA; note = Description of Artificial Sequence: Synthetic oligonucleotide
ccccacttctgtcatggttt

SEQ ID NO: 25146 - DNA, 20 bp, synthetic construct
  source 1..20: mol_type = other DNA; note = Description of Artificial Sequence: Synthetic oligonucleotide
tccccacttctgtcatggtt

SEQ ID NO: 25147 - DNA, 20 bp, synthetic construct
  source 1..20: mol_type = other DNA; note = Description of Artificial Sequence: Synthetic oligonucleotide
ttccccacttctgtcatggt

SEQ ID NO: 25148 - DNA, 20 bp, synthetic construct
  source 1..20: mol_type = other DNA; note = Description of Artificial Sequence: Synthetic oligonucleotide
cttccccacttctgtcatgg

SEQ ID NO: 25149 - DNA, 20 bp, synthetic construct
  source 1..20: mol_type = other DNA; note = Description of Artificial Sequence: Synthetic oligonucleotide
acttccccacttctgtcatg

SEQ ID NO: 25150 - DNA, 20 bp, synthetic construct
  source 1..20: mol_type = other DNA; note = Description of Artificial Sequence: Synthetic oligonucleotide
aacttccccacttctgtcat

SEQ ID NO: 25151 - DNA, 20 bp, synthetic construct
  source 1..20: mol_type = other DNA; note = Description of Artificial Sequence: Synthetic oligonucleotide
gaacttccccacttctgtca

SEQ ID NO: 25152 - DNA, 20 bp, synthetic construct
  source 1..20: mol_type = other DNA; note = Description of Artificial Sequence: Synthetic oligonucleotide
tgaacttccccacttctgtc

SEQ ID NO: 25153 - DNA, 20 bp, synthetic construct
  source 1..20: mol_type = other DNA; note = Description of Artificial Sequence: Synthetic oligonucleotide
ttgaacttccccacttctgt

SEQ ID NO: 25154 - DNA, 20 bp, synthetic construct
  source 1..20: mol_type = other DNA; note = Description of Artificial Sequence: Synthetic oligonucleotide
attgaacttccccacttctg

SEQ ID NO: 25155 - DNA, 20 bp, synthetic construct
  source 1..20: mol_type = other DNA; note = Description of Artificial Sequence: Synthetic oligonucleotide
cattgaacttccccacttct

SEQ ID NO: 25156 - DNA, 20 bp, synthetic construct
  source 1..20: mol_type = other DNA; note = Description of Artificial Sequence: Synthetic oligonucleotide
acattgaacttccccacttc

SEQ ID NO: 25157 - DNA, 20 bp, synthetic construct
  source 1..20: mol_type = other DNA; note = Description of Artificial Sequence: Synthetic oligonucleotide
gacattgaacttccccactt

SEQ ID NO: 25158 - DNA, 20 bp, synthetic construct
  source 1..20: mol_type = other DNA; note = Description of Artificial Sequence: Synthetic oligonucleotide
ggacattgaacttccccact

SEQ ID NO: 25159 - DNA, 20 bp, synthetic construct
  source 1..20: mol_type = other DNA; note = Description of Artificial Sequence: Synthetic oligonucleotide
aggacattgaacttccccac

SEQ ID NO: 25160 - DNA, 20 bp, synthetic construct
  source 1..20: mol_type = other DNA; note = Description of Artificial Sequence: Synthetic oligonucleotide
aaggacattgaacttcccca

SEQ ID NO: 25161 - DNA, 20 bp, synthetic construct
  source 1..20: mol_type = other DNA; note = Description of Artificial Sequence: Synthetic oligonucleotide
taaggacattgaacttcccc

SEQ ID NO: 25162 - DNA, 20 bp, synthetic construct
  source 1..20: mol_type = other DNA; note = Description of Artificial Sequence: Synthetic oligonucleotide
ttaaggacattgaacttccc

SEQ ID NO: 25163 - DNA, 20 bp, synthetic construct
  source 1..20: mol_type = other DNA; note = Description of Artificial Sequence: Synthetic oligonucleotide
tttaaggacattgaacttcc

SEQ ID NO: 25164 - DNA, 20 bp, synthetic construct
  source 1..20: mol_type = other DNA; note = Description of Artificial Sequence: Synthetic oligonucleotide
atttaaggacattgaacttc

SEQ ID NO: 25165 - DNA, 20 bp, synthetic construct
  source 1..20: mol_type = other DNA; note = Description of Artificial Sequence: Synthetic oligonucleotide
gatttaaggacattgaactt

SEQ ID NO: 25166 - DNA, 20 bp, synthetic construct
  source 1..20: mol_type = other DNA; note = Description of Artificial Sequence: Synthetic oligonucleotide
ggatttaaggacattgaact

SEQ ID NO: 25167 - DNA, 20 bp, synthetic construct
  source 1..20: mol_type = other DNA; note = Description of Artificial Sequence: Synthetic oligonucleotide
tggatttaaggacattgaac

SEQ ID NO: 25168 - DNA, 20 bp, synthetic construct
  source 1..20: mol_type = other DNA; note = Description of Artificial Sequence: Synthetic oligonucleotide
atggatttaaggacattgaa

SEQ ID NO: 25169 - DNA, 20 bp, synthetic construct
  source 1..20: mol_type = other DNA; note = Description of Artificial Sequence: Synthetic oligonucleotide
gatggatttaaggacattga

SEQ ID NO: 25170 - DNA, 20 bp, synthetic construct
  source 1..20: mol_type = other DNA; note = Description of Artificial Sequence: Synthetic oligonucleotide
agatggatttaaggacattg

SEQ ID NO: 25171 - DNA, 20 bp, synthetic construct
  source 1..20: mol_type = other DNA; note = Description of Artificial Sequence: Synthetic oligonucleotide
aagatggatttaaggacatt

SEQ ID NO: 25172 - DNA, 20 bp, synthetic construct
  source 1..20: mol_type = other DNA; note = Description of Artificial Sequence: Synthetic oligonucleotide
taagatggatttaaggacat

SEQ ID NO: 25173 - DNA, 20 bp, synthetic construct
  source 1..20: mol_type = other DNA; note = Description of Artificial Sequence: Synthetic oligonucleotide
gtaagatggatttaaggaca

SEQ ID NO: 25174 - DNA, 20 bp, synthetic construct
  source 1..20: mol_type = other DNA; note = Description of Artificial Sequence: Synthetic oligonucleotide
agtaagatggatttaaggac

SEQ ID NO: 25175 - DNA, 20 bp, synthetic construct
  source 1..20: mol_type = other DNA; note = Description of Artificial Sequence: Synthetic oligonucleotide
aagtaagatggatttaagga

SEQ ID NO: 25176 - DNA, 20 bp, synthetic construct
  source 1..20: mol_type = other DNA; note = Description of Artificial Sequence: Synthetic oligonucleotide
caagtaagatggatttaagg

SEQ ID NO: 25177 - DNA, 20 bp, synthetic construct
  source 1..20: mol_type = other DNA; note = Description of Artificial Sequence: Synthetic oligonucleotide
gcaagtaagatggatttaag

SEQ ID NO: 25178 - DNA, 20 bp, synthetic construct
  source 1..20: mol_type = other DNA; note = Description of Artificial Sequence: Synthetic oligonucleotide
ggcaagtaagatggatttaa

SEQ ID NO: 25179 - DNA, 20 bp, synthetic construct
  source 1..20: mol_type = other DNA; note = Description of Artificial Sequence: Synthetic oligonucleotide
tggcaagtaagatggattta

SEQ ID NO: 25180 - DNA, 20 bp, synthetic construct
  source 1..20: mol_type = other DNA; note = Description of Artificial Sequence: Synthetic oligonucleotide
ttggcaagtaagatggattt

SEQ ID NO: 25181 - DNA, 20 bp, synthetic construct
  source 1..20: mol_type = other DNA; note = Description of Artificial Sequence: Synthetic oligonucleotide
gttggcaagtaagatggatt

SEQ ID NO: 25182 - DNA, 20 bp, synthetic construct
  source 1..20: mol_type = other DNA; note = Description of Artificial Sequence: Synthetic oligonucleotide
tgttggcaagtaagatggat

SEQ ID NO: 25183 - DNA, 20 bp, synthetic construct
  source 1..20: mol_type = other DNA; note = Description of Artificial Sequence: Synthetic oligonucleotide
ctgttggcaagtaagatgga

SEQ ID NO: 25184 - DNA, 20 bp, synthetic construct
  source 1..20: mol_type = other DNA; note = Description of Artificial Sequence: Synthetic oligonucleotide
cctgttggcaagtaagatgg

SEQ ID NO: 25185 - DNA, 20 bp, synthetic construct
  source 1..20: mol_type = other DNA; note = Description of Artificial Sequence: Synthetic oligonucleotide
acctgttggcaagtaagatg

SEQ ID NO: 25186 - DNA, 20 bp, synthetic construct
  source 1..20: mol_type = other DNA; note = Description of Artificial Sequence: Synthetic oligonucleotide
tacctgttggcaagtaagat

SEQ ID NO: 25187 - DNA, 20 bp, synthetic construct
  source 1..20: mol_type = other DNA; note = Description of Artificial Sequence: Synthetic oligonucleotide
ttacctgttggcaagtaaga

SEQ ID NO: 25188 - DNA, 20 bp, synthetic construct
  source 1..20: mol_type = other DNA; note = Description of Artificial Sequence: Synthetic oligonucleotide
cttacctgttggcaagtaag

SEQ ID NO: 25189 - DNA, 20 bp, synthetic construct
  source 1..20: mol_type = other DNA; note = Description of Artificial Sequence: Synthetic oligonucleotide
tcttacctgttggcaagtaa

SEQ ID NO: 25190 - DNA, 20 bp, synthetic construct
  source 1..20: mol_type = other DNA; note = Description of Artificial Sequence: Synthetic oligonucleotide
ctcttacctgttggcaagta

SEQ ID NO: 25191 - DNA, 20 bp, synthetic construct
  source 1..20: mol_type = other DNA; note = Description of Artificial Sequence: Synthetic oligonucleotide
cctcttacctgttggcaagt

SEQ ID NO: 25192 - DNA, 20 bp, synthetic construct
  source 1..20: mol_type = other DNA; note = Description of Artificial Sequence: Synthetic oligonucleotide
tcctcttacctgttggcaag

SEQ ID NO: 25193 - DNA, 20 bp, synthetic construct
  source 1..20: mol_type = other DNA; note = Description of Artificial Sequence: Synthetic oligonucleotide
ttcctcttacctgttggcaa

SEQ ID NO: 25194 - DNA, 20 bp, synthetic construct
  source 1..20: mol_type = other DNA; note = Description of Artificial Sequence: Synthetic oligonucleotide
cttcctcttacctgttggca

SEQ ID NO: 25195 - DNA, 20 bp, synthetic construct
  source 1..20: mol_type = other DNA; note = Description of Artificial Sequence: Synthetic oligonucleotide
gcttcctcttacctgttggc

SEQ ID NO: 25196 - DNA, 20 bp, synthetic construct
  source 1..20: mol_type = other DNA; note = Description of Artificial Sequence: Synthetic oligonucleotide
agcttcctcttacctgttgg

SEQ ID NO: 25197 - DNA, 20 bp, synthetic construct
  source 1..20: mol_type = other DNA; note = Description of Artificial Sequence: Synthetic oligonucleotide
aagcttcctcttacctgttg

SEQ ID NO: 25198 - DNA, 20 bp, synthetic construct
  source 1..20: mol_type = other DNA; note = Description of Artificial Sequence: Synthetic oligonucleotide
taagcttcctcttacctgtt

SEQ ID NO: 25199 - DNA, 20 bp, synthetic construct
  source 1..20: mol_type = other DNA; note = Description of Artificial Sequence: Synthetic oligonucleotide
gtaagcttcctcttacctgt

SEQ ID NO: 25200 - DNA, 20 bp, synthetic construct
  source 1..20: mol_type = other DNA; note = Description of Artificial Sequence: Synthetic oligonucleotide
tgtaagcttcctcttacctg

SEQ ID NO: 25201 - DNA, 20 bp, synthetic construct
  source 1..20: mol_type = other DNA; note = Description of Artificial Sequence: Synthetic oligonucleotide
atgtaagcttcctcttacct

SEQ ID NO: 25202 - DNA, 20 bp, synthetic construct
  source 1..20: mol_type = other DNA; note = Description of Artificial Sequence: Synthetic oligonucleotide
aatgtaagcttcctcttacc

SEQ ID NO: 25203 - DNA, 20 bp, synthetic construct
  source 1..20: mol_type = other DNA; note = Description of Artificial Sequence: Synthetic oligonucleotide
taatgtaagcttcctcttac

SEQ ID NO: 25204 - DNA, 20 bp, synthetic construct
  source 1..20: mol_type = other DNA; note = Description of Artificial Sequence: Synthetic oligonucleotide
gtaatgtaagcttcctctta

SEQ ID NO: 25205 - DNA, 20 bp, synthetic construct
  source 1..20: mol_type = other DNA; note = Description of Artificial Sequence: Synthetic oligonucleotide
tgtaatgtaagcttcctctt

SEQ ID NO: 25206 - DNA, 20 bp, synthetic construct
  source 1..20: mol_type = other DNA; note = Description of Artificial Sequence: Synthetic oligonucleotide
atgtaatgtaagcttcctct

SEQ ID NO: 25207 - DNA, 20 bp, synthetic construct
  source 1..20: mol_type = other DNA; note = Description of Artificial Sequence: Synthetic oligonucleotide
catgtaatgtaagcttcctc

SEQ ID NO: 25208 - DNA, 20 bp, synthetic construct
  source 1..20: mol_type = other DNA; note = Description of Artificial Sequence: Synthetic oligonucleotide
acatgtaatgtaagcttcct

SEQ ID NO: 25209 - DNA, 20 bp, synthetic construct
  source 1..20: mol_type = other DNA; note = Description of Artificial Sequence: Synthetic oligonucleotide
gacatgtaatgtaagcttcc

SEQ ID NO: 25210 - DNA, 20 bp, synthetic construct
  source 1..20: mol_type = other DNA; note = Description of Artificial Sequence: Synthetic oligonucleotide
ggacatgtaatgtaagcttc

SEQ ID NO: 25211 - DNA, 20 bp, synthetic construct
  source 1..20: mol_type = other DNA; note = Description of Artificial Sequence: Synthetic oligonucleotide
tggacatgtaatgtaagctt

SEQ ID NO: 25212 - DNA, 20 bp, synthetic construct
  source 1..20: mol_type = other DNA; note = Description of Artificial Sequence: Synthetic oligonucleotide
ctggacatgtaatgtaagct

SEQ ID NO: 25213 - DNA, 20 bp, synthetic construct
  source 1..20: mol_type = other DNA; note = Description of Artificial Sequence: Synthetic oligonucleotide
actggacatgtaatgtaagc

SEQ ID NO: 25214 - DNA, 20 bp, synthetic construct
  source 1..20: mol_type = other DNA; note = Description of Artificial Sequence: Synthetic oligonucleotide
gactggacatgtaatgtaag

SEQ ID NO: 25215 - DNA, 20 bp, synthetic construct
  source 1..20: mol_type = other DNA; note = Description of Artificial Sequence: Synthetic oligonucleotide
ggactggacatgtaatgtaa

SEQ ID NO: 25216 - DNA, 20 bp, synthetic construct
  source 1..20: mol_type = other DNA; note = Description of Artificial Sequence: Synthetic oligonucleotide
tggactggacatgtaatgta

SEQ ID NO: 25217 - DNA, 20 bp, synthetic construct
  source 1..20: mol_type = other DNA; note = Description of Artificial Sequence: Synthetic oligonucleotide
gtggactggacatgtaatgt

SEQ ID NO: 25218 - DNA, 20 bp, synthetic construct
  source 1..20: mol_type = other DNA; note = Description of Artificial Sequence: Synthetic oligonucleotide
tgtggactggacatgtaatg

SEQ ID NO: 25219 - DNA, 20 bp, synthetic construct
  source 1..20: mol_type = other DNA; note = Description of Artificial Sequence: Synthetic oligonucleotide
atgtggactggacatgtaat

SEQ ID NO: 25220 - DNA, 20 bp, synthetic construct
  source 1..20: mol_type = other DNA; note = Description of Artificial Sequence: Synthetic oligonucleotide
aatgtggactggacatgtaa

SEQ ID NO: 25221 - DNA, 20 bp, synthetic construct
  source 1..20: mol_type = other DNA; note = Description of Artificial Sequence: Synthetic oligonucleotide
aaatgtggactggacatgta

SEQ ID NO: 25222 - DNA, 20 bp, synthetic construct
  source 1..20: mol_type = other DNA; note = Description of Artificial Sequence: Synthetic oligonucleotide
taaatgtggactggacatgt

SEQ ID NO: 25223 - DNA, 20 bp, synthetic construct
  source 1..20: mol_type = other DNA; note = Description of Artificial Sequence: Synthetic oligonucleotide
ttaaatgtggactggacatg

SEQ ID NO: 25224 - DNA, 20 bp, synthetic construct
  source 1..20: mol_type = other DNA; note = Description of Artificial Sequence: Synthetic oligonucleotide
tttaaatgtggactggacat

SEQ ID NO: 25225 - DNA, 20 bp, synthetic construct
  source 1..20: mol_type = other DNA; note = Description of Artificial Sequence: Synthetic oligonucleotide
ctttaaatgtggactggaca

SEQ ID NO: 25226 - DNA, 20 bp, synthetic construct
  source 1..20: mol_type = other DNA; note = Description of Artificial Sequence: Synthetic oligonucleotide
tctttaaatgtggactggac

SEQ ID NO: 25227 - DNA, 20 bp, synthetic construct
  source 1..20: mol_type = other DNA; note = Description of Artificial Sequence: Synthetic oligonucleotide
ctctttaaatgtggactgga

SEQ ID NO: 25228 - DNA, 20 bp, synthetic construct
  source 1..20: mol_type = other DNA; note = Description of Artificial Sequence: Synthetic oligonucleotide
gctctttaaatgtggactgg

SEQ ID NO: 25229 - DNA, 20 bp, synthetic construct
  source 1..20: mol_type = other DNA; note = Description of Artificial Sequence: Synthetic oligonucleotide
tgctctttaaatgtggactg

SEQ ID NO: 25230 - DNA, 20 bp, synthetic construct
  source 1..20: mol_type = other DNA; note = Description of Artificial Sequence: Synthetic oligonucleotide
gtgctctttaaatgtggact

SEQ ID NO: 25231 - DNA, 20 bp, synthetic construct
  source 1..20: mol_type = other DNA; note = Description of Artificial Sequence: Synthetic oligonucleotide
agtgctctttaaatgtggac

SEQ ID NO: 25232 - DNA, 20 bp, synthetic construct
  source 1..20: mol_type = other DNA; note = Description of Artificial Sequence: Synthetic oligonucleotide
aagtgctctttaaatgtgga

SEQ ID NO: 25233 - DNA, 20 bp, synthetic construct
  source 1..20: mol_type = other DNA; note = Description of Artificial Sequence: Synthetic oligonucleotide
taagtgctctttaaatgtgg

SEQ ID NO: 25234 - DNA, 20 bp, synthetic construct
  source 1..20: mol_type = other DNA; note = Description of Artificial Sequence: Synthetic oligonucleotide
gtaagtgctctttaaatgtg

SEQ ID NO: 25235 - DNA, 20 bp, synthetic construct
  source 1..20: mol_type = other DNA; note = Description of Artificial Sequence: Synthetic oligonucleotide
agtaagtgctctttaaatgt

SEQ ID NO: 25236 - DNA, 20 bp, synthetic construct
  source 1..20: mol_type = other DNA; note = Description of Artificial Sequence: Synthetic oligonucleotide
cagtaagtgctctttaaatg

SEQ ID NO: 25237 - DNA, 20 bp, synthetic construct
  source 1..20: mol_type = other DNA; note = Description of Artificial Sequence: Synthetic oligonucleotide
acagtaagtgctctttaaat

SEQ ID NO: 25238 - DNA, 20 bp, synthetic construct
  source 1..20: mol_type = other DNA; note = Description of Artificial Sequence: Synthetic oligonucleotide
cacagtaagtgctctttaaa

SEQ ID NO: 25239 - DNA, 20 bp, synthetic construct
  source 1..20: mol_type = other DNA; note = Description of Artificial Sequence: Synthetic oligonucleotide
ccacagtaagtgctctttaa

SEQ ID NO: 25240 - DNA, 20 bp, synthetic construct
  source 1..20: mol_type = other DNA; note = Description of Artificial Sequence: Synthetic oligonucleotide
tccacagtaagtgctcttta

SEQ ID NO: 25241 - DNA, 20 bp, synthetic construct
  source 1..20: mol_type = other DNA; note = Description of Artificial Sequence: Synthetic oligonucleotide
ttccacagtaagtgctcttt

SEQ ID NO: 25242 - DNA, 20 bp, synthetic construct
  source 1..20: mol_type = other DNA; note = Description of Artificial Sequence: Synthetic oligonucleotide
gttccacagtaagtgctctt

SEQ ID NO: 25243 - DNA, 20 bp, synthetic construct
  source 1..20: mol_type = other DNA; note = Description of Artificial Sequence: Synthetic oligonucleotide
tgttccacagtaagtgctct

SEQ ID NO: 25244 - DNA, 20 bp, synthetic construct
  source 1..20: mol_type = other DNA; note = Description of Artificial Sequence: Synthetic oligonucleotide
ttgttccacagtaagtgctc

SEQ ID NO: 25245 - DNA, 20 bp, synthetic construct
  source 1..20: mol_type = other DNA; note = Description of Artificial Sequence: Synthetic oligonucleotide
cttgttccacagtaagtgct

SEQ ID NO: 25246 - DNA, 20 bp, synthetic construct
  source 1..20: mol_type = other DNA; note = Description of Artificial Sequence: Synthetic oligonucleotide
gcttgttccacagtaagtgc

SEQ ID NO: 25247 - DNA, 20 bp, synthetic construct
  source 1..20: mol_type = other DNA; note = Description of Artificial Sequence: Synthetic oligonucleotide
ggcttgttccacagtaagtg

SEQ ID NO: 25248 - DNA, 20 bp, synthetic construct
  source 1..20: mol_type = other DNA; note = Description of Artificial Sequence: Synthetic oligonucleotide
aggcttgttccacagtaagt

SEQ ID NO: 25249 - DNA, 20 bp, synthetic construct
  source 1..20: mol_type = other DNA; note = Description of Artificial Sequence: Synthetic oligonucleotide
aaggcttgttccacagtaag

SEQ ID NO: 25250 - DNA, 20 bp, synthetic construct
  source 1..20: mol_type = other DNA; note = Description of Artificial Sequence: Synthetic oligonucleotide
gaaggcttgttccacagtaa

SEQ ID NO: 25251 - DNA, 20 bp, synthetic construct
  source 1..20: mol_type = other DNA; note = Description of Artificial Sequence: Synthetic oligonucleotide
tgaaggcttgttccacagta

SEQ ID NO: 25252 - DNA, 20 bp, synthetic construct
  source 1..20: mol_type = other DNA; note = Description of Artificial Sequence: Synthetic oligonucleotide
ctgaaggcttgttccacagt

SEQ ID NO: 25253 - DNA, 20 bp, synthetic construct
  source 1..20: mol_type = other DNA; note = Description of Artificial Sequence: Synthetic oligonucleotide
gctgaaggcttgttccacag

SEQ ID NO: 25254 - DNA, 20 bp, synthetic construct
  source 1..20: mol_type = other DNA; note = Description of Artificial Sequence: Synthetic oligonucleotide
ggctgaaggcttgttccaca

SEQ ID NO: 25255 - DNA, 20 bp, synthetic construct
  source 1..20: mol_type = other DNA; note = Description of Artificial Sequence: Synthetic oligonucleotide
tggctgaaggcttgttccac

SEQ ID NO: 25256 - DNA, 20 bp, synthetic construct
  source 1..20: mol_type = other DNA; note = Description of Artificial Sequence: Synthetic oligonucleotide
ttggctgaaggcttgttcca

SEQ ID NO: 25257 - DNA, 20 bp, synthetic construct
  source 1..20: mol_type = other DNA; note = Description of Artificial Sequence: Synthetic oligonucleotide
tttggctgaaggcttgttcc

SEQ ID NO: 25258 - DNA, 20 bp, synthetic construct
  source 1..20: mol_type = other DNA; note = Description of Artificial Sequence: Synthetic oligonucleotide
gtttggctgaaggcttgttc

SEQ ID NO: 25259 - DNA, 20 bp, synthetic construct
  source 1..20: mol_type = other DNA; note = Description of Artificial Sequence: Synthetic oligonucleotide
tgtttggctgaaggcttgtt

SEQ ID NO: 25260 - DNA, 20 bp, synthetic construct
  source 1..20: mol_type = other DNA; note = Description of Artificial Sequence: Synthetic oligonucleotide
ttgtttggctgaaggcttgt

SEQ ID NO: 25261 - DNA, 20 bp, synthetic construct
  source 1..20: mol_type = other DNA; note = Description of Artificial Sequence: Synthetic oligonucleotide
attgtttggctgaaggcttg

SEQ ID NO: 25262 - DNA, 20 bp, synthetic construct
  source 1..20: mol_type = other DNA; note = Description of Artificial Sequence: Synthetic oligonucleotide
cattgtttggctgaaggctt

SEQ ID NO: 25263 - DNA, 20 bp, synthetic construct
  source 1..20: mol_type = other DNA; note = Description of Artificial Sequence: Synthetic oligonucleotide
ccattgtttggctgaaggct

SEQ ID NO: 25264 - DNA, 20 bp, synthetic construct
  source 1..20: mol_type = other DNA; note = Description of Artificial Sequence: Synthetic oligonucleotide
cccattgtttggctgaaggc

SEQ ID NO: 25265 - DNA, 20 bp, synthetic construct
  source 1..20: mol_type = other DNA; note = Description of Artificial Sequence: Synthetic oligonucleotide
ccccattgtttggctgaagg

SEQ ID NO: 25266 - DNA, 20 bp, synthetic construct
  source 1..20: mol_type = other DNA; note = Description of Artificial Sequence: Synthetic oligonucleotide
tccccattgtttggctgaag

SEQ ID NO: 25267 - DNA, 20 bp, synthetic construct
  source 1..20: mol_type = other DNA; note = Description of Artificial Sequence: Synthetic oligonucleotide
atccccattgtttggctgaa

SEQ ID NO: 25268 - DNA, 20 bp, synthetic construct
  source 1..20: mol_type = other DNA; note = Description of Artificial Sequence: Synthetic oligonucleotide
tatccccattgtttggctga

SEQ ID NO: 25269 - DNA, 20 bp, synthetic construct
  source 1..20: mol_type = other DNA; note = Description of Artificial Sequence: Synthetic oligonucleotide
ctatccccattgtttggctg

SEQ ID NO: 25270 - DNA, 20 bp, synthetic construct
  source 1..20: mol_type = other DNA; note = Description of Artificial Sequence: Synthetic oligonucleotide
tctatccccattgtttggct

SEQ ID NO: 25271 - DNA, 20 bp, synthetic construct
  source 1..20: mol_type = other DNA; note = Description of Artificial Sequence: Synthetic oligonucleotide
ttctatccccattgtttggc

SEQ ID NO: 25272 - DNA, 20 bp, synthetic construct
  source 1..20: mol_type = other DNA; note = Description of Artificial Sequence: Synthetic oligonucleotide
tttctatccccattgtttgg

SEQ ID NO: 25273 - DNA, 20 bp, synthetic construct
  source 1..20: mol_type = other DNA; note = Description of Artificial Sequence: Synthetic oligonucleotide
ttttctatccccattgtttg

SEQ ID NO: 25274 - DNA, 20 bp, synthetic construct
  source 1..20: mol_type = other DNA; note = Description of Artificial Sequence: Synthetic oligonucleotide
cttttctatccccattgttt

SEQ ID NO: 25275 - DNA, 20 bp, synthetic construct
  source 1..20: mol_type = other DNA; note = Description of Artificial Sequence: Synthetic oligonucleotide
acttttctatccccattgtt

SEQ ID NO: 25276 - DNA, 20 bp, synthetic construct
  source 1..20: mol_type = other DNA; note = Description of Artificial Sequence: Synthetic oligonucleotide
tacttttctatccccattgt

SEQ ID NO: 25277 - DNA, 20 bp, synthetic construct
  source 1..20: mol_type = other DNA; note = Description of Artificial Sequence: Synthetic oligonucleotide
ctacttttctatccccattg

SEQ ID NO: 25278 - DNA, 20 bp, synthetic construct
  source 1..20: mol_type = other DNA; note = Description of Artificial Sequence: Synthetic oligonucleotide
cctacttttctatccccatt

SEQ ID NO: 25279 - DNA, 20 bp, synthetic construct
  source 1..20: mol_type = other DNA; note = Description of Artificial Sequence: Synthetic oligonucleotide
acctacttttctatccccat

SEQ ID NO: 25280 - DNA, 20 bp, synthetic construct
  source 1..20: mol_type = other DNA; note = Description of Artificial Sequence: Synthetic oligonucleotide
tacctacttttctatcccca

SEQ ID NO: 25281 - DNA, 20 bp, synthetic construct
  source 1..20: mol_type = other DNA; note = Description of Artificial Sequence: Synthetic oligonucleotide
ttacctacttttctatcccc

SEQ ID NO: 25282 - DNA, 20 bp, synthetic construct
  source 1..20: mol_type = other DNA; note = Description of Artificial Sequence: Synthetic oligonucleotide
cttacctacttttctatccc

SEQ ID NO: 25283 - DNA, 20 bp, synthetic construct
  source 1..20: mol_type = other DNA; note = Description of Artificial Sequence: Synthetic oligonucleotide
tcttacctacttttctatcc

SEQ ID NO: 25284 - DNA, 20 bp, synthetic construct
  source 1..20: mol_type = other DNA; note = Description of Artificial Sequence: Synthetic oligonucleotide
gtcttacctacttttctatc

SEQ ID NO: 25285 - DNA, 20 bp, synthetic construct
  source 1..20: mol_type = other DNA; note = Description of Artificial Sequence: Synthetic oligonucleotide
agtcttacctacttttctat

SEQ ID NO: 25286 - DNA, 20 bp, synthetic construct
  source 1..20: mol_type = other DNA; note = Description of Artificial Sequence: Synthetic oligonucleotide
gagtcttacctacttttcta

SEQ ID NO: 25287 - DNA, 20 bp, synthetic construct
  source 1..20: mol_type = other DNA; note = Description of Artificial Sequence: Synthetic oligonucleotide
tgagtcttacctacttttct

SEQ ID NO: 25288 - DNA, 20 bp, synthetic construct
  source 1..20: mol_type = other DNA; note = Description of Artificial Sequence: Synthetic oligonucleotide
ctgagtcttacctacttttc

SEQ ID NO: 25289 - DNA, 20 bp, synthetic construct
  source 1..20: mol_type = other DNA; note = Description of Artificial Sequence: Synthetic oligonucleotide
gctgagtcttacctactttt

SEQ ID NO: 25290 - DNA, 20 bp, synthetic construct
  source 1..20: mol_type = other DNA; note = Description of Artificial Sequence: Synthetic oligonucleotide
ggctgagtcttacctacttt

SEQ ID NO: 25291 - DNA, 20 bp, synthetic construct
  source 1..20: mol_type = other DNA; note = Description of Artificial Sequence: Synthetic oligonucleotide
aggctgagtcttacctactt

SEQ ID NO: 25292 - DNA, 20 bp, synthetic construct
  source 1..20: mol_type = other DNA; note = Description of Artificial Sequence: Synthetic oligonucleotide
aaggctgagtcttacctact

SEQ ID NO: 25293 - DNA, 20 bp, synthetic construct
  source 1..20: mol_type = other DNA; note = Description of Artificial Sequence: Synthetic oligonucleotide
aaaggctgagtcttacctac

SEQ ID NO: 25294 - DNA, 20 bp, synthetic construct
  source 1..20: mol_type = other DNA; note = Description of Artificial Sequence: Synthetic oligonucleotide
caaaggctgagtcttaccta

SEQ ID NO: 25295 - DNA, 20 bp, synthetic construct
  source 1..20: mol_type = other DNA; note = Description of Artificial Sequence: Synthetic oligonucleotide
acaaaggctgagtcttacct

SEQ ID NO: 25296 - DNA, 20 bp, synthetic construct
  source 1..20: mol_type = other DNA; note = Description of Artificial Sequence: Synthetic oligonucleotide
gacaaaggctgagtcttacc

SEQ ID NO: 25297 - DNA, 20 bp, synthetic construct
  source 1..20: mol_type = other DNA; note = Description of Artificial Sequence: Synthetic oligonucleotide
ggacaaaggctgagtcttac

SEQ ID NO: 25298 - DNA, 20 bp, synthetic construct
  source 1..20: mol_type = other DNA; note = Description of Artificial Sequence: Synthetic oligonucleotide
tggacaaaggctgagtctta

SEQ ID NO: 25299 - DNA, 20 bp, synthetic construct
  source 1..20: mol_type = other DNA; note = Description of Artificial Sequence: Synthetic oligonucleotide
ctggacaaaggctgagtctt

SEQ ID NO: 25300 - DNA, 20 bp, synthetic construct
  source 1..20: mol_type = other DNA; note = Description of Artificial Sequence: Synthetic oligonucleotide
tctggacaaaggctgagtct

SEQ ID NO: 25301 - DNA, 20 bp, synthetic construct
  source 1..20: mol_type = other DNA; note = Description of Artificial Sequence: Synthetic oligonucleotide
ctctggacaaaggctgagtc

SEQ ID NO: 25302 - DNA, 20 bp, synthetic construct
  source 1..20: mol_type = other DNA; note = Description of Artificial Sequence: Synthetic oligonucleotide
tctctggacaaaggctgagt

SEQ ID NO: 25303 - DNA, 20 bp, synthetic construct
  source 1..20: mol_type = other DNA; note = Description of Artificial Sequence: Synthetic oligonucleotide
ttctctggacaaaggctgag

SEQ ID NO: 25304 - DNA, 20 bp, synthetic construct
  source 1..20: mol_type = other DNA; note = Description of Artificial Sequence: Synthetic oligonucleotide
cttctctggacaaaggctga

SEQ ID NO: 25305 - DNA, 20 bp, synthetic construct
  source 1..20: mol_type = other DNA; note = Description of Artificial Sequence: Synthetic oligonucleotide
gcttctctggacaaaggctg

SEQ ID NO: 25306 - DNA, 20 bp, synthetic construct
  source 1..20: mol_type = other DNA; note = Description of Artificial Sequence: Synthetic oligonucleotide
agcttctctggacaaaggct

SEQ ID NO: 25307 - DNA, 20 bp, synthetic construct
  source 1..20: mol_type = other DNA; note = Description of Artificial Sequence: Synthetic oligonucleotide
gagcttctctggacaaaggc

SEQ ID NO: 25308 - DNA, 20 bp, synthetic construct
  source 1..20: mol_type = other DNA; note = Description of Artificial Sequence: Synthetic oligonucleotide
tgagcttctctggacaaagg

SEQ ID NO: 25309 - DNA, 20 bp, synthetic construct
  source 1..20: mol_type = other DNA; note = Description of Artificial Sequence: Synthetic oligonucleotide
ctgagcttctctggacaaag

SEQ ID NO: 25310 - DNA, 20 bp, synthetic construct
  source 1..20: mol_type = other DNA; note = Description of Artificial Sequence: Synthetic oligonucleotide
cctgagcttctctggacaaa

SEQ ID NO: 25311 - DNA, 20 bp, synthetic construct
  source 1..20: mol_type = other DNA; note = Description of Artificial Sequence: Synthetic oligonucleotide
ccctgagcttctctggacaa

SEQ ID NO: 25312 - DNA, 20 bp, synthetic construct
  source 1..20: mol_type = other DNA; note = Description of Artificial Sequence: Synthetic oligonucleotide
accctgagcttctctggaca

SEQ ID NO: 25313 - DNA, 20 bp, synthetic construct
  source 1..20: mol_type = other DNA; note = Description of Artificial Sequence: Synthetic oligonucleotide
taccctgagcttctctggac

SEQ ID NO: 25314 - DNA, 20 bp, synthetic construct
  source 1..20: mol_type = other DNA; note = Description of Artificial Sequence: Synthetic oligonucleotide
ataccctgagcttctctgga

SEQ ID NO: 25315 - DNA, 20 bp, synthetic construct
  source 1..20: mol_type = other DNA; note = Description of Artificial Sequence: Synthetic oligonucleotide
tataccctgagcttctctgg

SEQ ID NO: 25316 - DNA, 20 bp, synthetic construct
  source 1..20: mol_type = other DNA; note = Description of Artificial Sequence: Synthetic oligonucleotide
ctataccctgagcttctctg

SEQ ID NO: 25317 - DNA, 20 bp, synthetic construct
  source 1..20: mol_type = other DNA; note = Description of Artificial Sequence: Synthetic oligonucleotide
gctataccctgagcttctct

SEQ ID NO: 25318 - DNA, 20 bp, synthetic construct
  source 1..20: mol_type = other DNA; note = Description of Artificial Sequence: Synthetic oligonucleotide
agctataccctgagcttctc

SEQ ID NO: 25319 - DNA, 20 bp, synthetic construct
  source 1..20: mol_type = other DNA; note = Description of Artificial Sequence: Synthetic oligonucleotide
cagctataccctgagcttct

SEQ ID NO: 25320 - DNA, 20 bp, synthetic construct
  source 1..20: mol_type = other DNA; note = Description of Artificial Sequence: Synthetic oligonucleotide
tcagctataccctgagcttc

SEQ ID NO: 25321 - DNA, 20 bp, synthetic construct
  source 1..20: mol_type = other DNA; note = Description of Artificial Sequence: Synthetic oligonucleotide
ttcagctataccctgagctt

SEQ ID NO: 25322 - DNA, 20 bp, synthetic construct
  source 1..20: mol_type = other DNA; note = Description of Artificial Sequence: Synthetic oligonucleotide
attcagctataccctgagct

SEQ ID NO: 25323 - DNA, 20 bp, synthetic construct
  source 1..20: mol_type = other DNA; note = Description of Artificial Sequence: Synthetic oligonucleotide
tattcagctataccctgagc

SEQ ID NO: 25324 - DNA, 20 bp, synthetic construct
  source 1..20: mol_type = other DNA; note = Description of Artificial Sequence: Synthetic oligonucleotide
ctattcagctataccctgag

SEQ ID NO: 25325 - DNA, 20 bp, synthetic construct
  source 1..20: mol_type = other DNA; note = Description of Artificial Sequence: Synthetic oligonucleotide
cctattcagctataccctga

SEQ ID NO: 25326 - DNA, 20 bp, synthetic construct
  source 1..20: mol_type = other DNA; note = Description of Artificial Sequence: Synthetic oligonucleotide
gcctattcagctataccctg

SEQ ID NO: 25327 - DNA, 20 bp, synthetic construct
  source 1..20: mol_type = other DNA; note = Description of Artificial Sequence: Synthetic oligonucleotide
tgcctattcagctataccct

SEQ ID NO: 25328 - DNA, 20 bp, synthetic construct
  source 1..20: mol_type = other DNA; note = Description of Artificial Sequence: Synthetic oligonucleotide
ctgcctattcagctataccc

SEQ ID NO: 25329 - DNA, 20 bp, synthetic construct
  source 1..20: mol_type = other DNA; note = Description of Artificial Sequence: Synthetic oligonucleotide
actgcctattcagctatacc

SEQ ID NO: 25330 - DNA, 20 bp, synthetic construct
  source 1..20: mol_type = other DNA; note = Description of Artificial Sequence: Synthetic oligonucleotide
aactgcctattcagctatac

SEQ ID NO: 25331 - DNA, 20 bp, synthetic construct
  source 1..20: mol_type = other DNA; note = Description of Artificial Sequence: Synthetic oligonucleotide
aaactgcctattcagctata

SEQ ID NO: 25332 - DNA, 20 bp, synthetic construct
  source 1..20: mol_type = other DNA; note = Description of Artificial Sequence: Synthetic oligonucleotide
gaaactgcctattcagctat

SEQ ID NO: 25333 - DNA, 20 bp, synthetic construct
  source 1..20: mol_type = other DNA; note = Description of Artificial Sequence: Synthetic oligonucleotide
agaaactgcctattcagcta

SEQ ID NO: 25334 - DNA, 20 bp, synthetic construct
  source 1..20: mol_type = other DNA; note = Description of Artificial Sequence: Synthetic oligonucleotide
aagaaactgcctattcagct

SEQ ID NO: 25335 - DNA, 20 bp, synthetic construct
  source 1..20: mol_type = other DNA; note = Description of Artificial Sequence: Synthetic oligonucleotide
aaagaaactgcctattcagc

SEQ ID NO: 25336 - DNA, 20 bp, synthetic construct
  source 1..20: mol_type = other DNA; note = Description of Artificial Sequence: Synthetic oligonucleotide
aaaagaaactgcctattcag

SEQ ID NO: 25337 - DNA, 20 bp, synthetic construct
  source 1..20: mol_type = other DNA; note = Description of Artificial Sequence: Synthetic oligonucleotide
caaaagaaactgcctattca

SEQ ID NO: 25338 - DNA, 20 bp, synthetic construct
  source 1..20: mol_type = other DNA; note = Description of Artificial Sequence: Synthetic oligonucleotide
acaaaagaaactgcctattc

SEQ ID NO: 25339 - DNA, 20 bp, synthetic construct
  source 1..20: mol_type = other DNA; note = Description of Artificial Sequence: Synthetic oligonucleotide
gacaaaagaaactgcctatt

SEQ ID NO: 25340 - DNA, 20 bp, synthetic construct
  source 1..20: mol_type = other DNA; note = Description of Artificial Sequence: Synthetic oligonucleotide
ggacaaaagaaactgcctat

SEQ ID NO: 25341 - DNA, 20 bp, synthetic construct
  source 1..20: mol_type = other DNA; note = Description of Artificial Sequence: Synthetic oligonucleotide
aggacaaaagaaactgccta

SEQ ID NO: 25342 - DNA, 20 bp, synthetic construct
  source 1..20: mol_type = other DNA; note = Description of Artificial Sequence: Synthetic oligonucleotide
caggacaaaagaaactgcct

SEQ ID NO: 25343 - DNA, 20 bp, synthetic construct
  source 1..20: mol_type = other DNA; note = Description of Artificial Sequence: Synthetic oligonucleotide
tcaggacaaaagaaactgcc

SEQ ID NO: 25344 - DNA, 20 bp, synthetic construct
  source 1..20: mol_type = other DNA; note = Description of Artificial Sequence: Synthetic oligonucleotide
ctcaggacaaaagaaactgc

SEQ ID NO: 25345 - DNA, 20 bp, synthetic construct
  source 1..20: mol_type = other DNA; note = Description of Artificial Sequence: Synthetic oligonucleotide
cctcaggacaaaagaaactg

SEQ ID NO: 25346 - DNA, 20 bp, synthetic construct
  source 1..20: mol_type = other DNA; note = Description of Artificial Sequence: Synthetic oligonucleotide
tcctcaggacaaaagaaact

SEQ ID NO: 25347 - DNA, 20 bp, synthetic construct
  source 1..20: mol_type = other DNA; note = Description of Artificial Sequence: Synthetic oligonucleotide
ttcctcaggacaaaagaaac

SEQ ID NO: 25348 - DNA, 20 bp, synthetic construct
  source 1..20: mol_type = other DNA; note = Description of Artificial Sequence: Synthetic oligonucleotide
tttcctcaggacaaaagaaa

SEQ ID NO: 25349 - DNA, 20 bp, synthetic construct
  source 1..20: mol_type = other DNA; note = Description of Artificial Sequence: Synthetic oligonucleotide
ttttcctcaggacaaaagaa

SEQ ID NO: 25350 - DNA, 20 bp, synthetic construct
  source 1..20: mol_type = other DNA; note = Description of Artificial Sequence: Synthetic oligonucleotide
attttcctcaggacaaaaga

SEQ ID NO: 25351 - DNA, 20 bp, synthetic construct
  source 1..20: mol_type = other DNA; note = Description of Artificial Sequence: Synthetic oligonucleotide
gattttcctcaggacaaaag

SEQ ID NO: 25352 - DNA, 20 bp, synthetic construct
  source 1..20: mol_type = other DNA; note = Description of Artificial Sequence: Synthetic oligonucleotide
tgattttcctcaggacaaaa

SEQ ID NO: 25353 - DNA, 20 bp, synthetic construct
  source 1..20: mol_type = other DNA; note = Description of Artificial Sequence: Synthetic oligonucleotide
ctgattttcctcaggacaaa

SEQ ID NO: 25354 - DNA, 20 bp, synthetic construct
  source 1..20: mol_type = other DNA; note = Description of Artificial Sequence: Synthetic oligonucleotide
cctgattttcctcaggacaa

SEQ ID NO: 25355 - DNA, 20 bp, synthetic construct
  source 1..20: mol_type = other DNA; note = Description of Artificial Sequence: Synthetic oligonucleotide
tcctgattttcctcaggaca

SEQ ID NO: 25356 - DNA, 20 bp, synthetic construct
  source 1..20: mol_type = other DNA; note = Description of Artificial Sequence: Synthetic oligonucleotide
gtcctgattttcctcaggac

SEQ ID NO: 25357 - DNA, 20 bp, synthetic construct
  source 1..20: mol_type = other DNA; note = Description of Artificial Sequence: Synthetic oligonucleotide
tgtcctgattttcctcagga

SEQ ID NO: 25358 - DNA, 20 bp, synthetic construct
  source 1..20: mol_type = other DNA; note = Description of Artificial Sequence: Synthetic oligonucleotide
atgtcctgattttcctcagg

SEQ ID NO: 25359 - DNA, 20 bp, synthetic construct
  source 1..20: mol_type = other DNA; note = Description of Artificial Sequence: Synthetic oligonucleotide
catgtcctgattttcctcag

SEQ ID NO: 25360 - DNA, 20 bp, synthetic construct
  source 1..20: mol_type = other DNA; note = Description of Artificial Sequence: Synthetic oligonucleotide
gcatgtcctgattttcctca

SEQ ID NO: 25361 - DNA, 20 bp, synthetic construct
  source 1..20: mol_type = other DNA; note = Description of Artificial Sequence: Synthetic oligonucleotide
ggcatgtcctgattttcctc

SEQ ID NO: 25362 - DNA, 20 bp, synthetic construct
  source 1..20: mol_type = other DNA; note = Description of Artificial Sequence: Synthetic oligonucleotide
aggcatgtcctgattttcct

SEQ ID NO: 25363 - DNA, 20 bp, synthetic construct
  source 1..20: mol_type = other DNA; note = Description of Artificial Sequence: Synthetic oligonucleotide
caggcatgtcctgattttcc

SEQ ID NO: 25364 - DNA, 20 bp, synthetic construct
  source 1..20: mol_type = other DNA; note = Description of Artificial Sequence: Synthetic oligonucleotide
gcaggcatgtcctgattttc

SEQ ID NO: 25365 - DNA, 20 bp, synthetic construct
  source 1..20: mol_type = other DNA; note = Description of Artificial Sequence: Synthetic oligonucleotide
agcaggcatgtcctgatttt

SEQ ID NO: 25366 - DNA, 20 bp, synthetic construct
  source 1..20: mol_type = other DNA; note = Description of Artificial Sequence: Synthetic oligonucleotide
aagcaggcatgtcctgattt

SEQ ID NO: 25367 - DNA, 20 bp, synthetic construct
  source 1..20: mol_type = other DNA; note = Description of Artificial Sequence: Synthetic oligonucleotide
aaagcaggcatgtcctgatt

SEQ ID NO: 25368 - DNA, 20 bp, synthetic construct
  source 1..20: mol_type = other DNA; note = Description of Artificial Sequence: Synthetic oligonucleotide
gaaagcaggcatgtcctgat

SEQ ID NO: 25369 - DNA, 20 bp, synthetic construct
  source 1..20: mol_type = other DNA; note = Description of Artificial Sequence: Synthetic oligonucleotide
agaaagcaggcatgtcctga

SEQ ID NO: 25370 - DNA, 20 bp, synthetic construct
  source 1..20: mol_type = other DNA; note = Description of Artificial Sequence: Synthetic oligonucleotide
tagaaagcaggcatgtcctg

SEQ ID NO: 25371 - DNA, 20 bp, synthetic construct
  source 1..20: mol_type = other DNA; note = Description of Artificial Sequence: Synthetic oligonucleotide
ttagaaagcaggcatgtcct

SEQ ID NO: 25372 - DNA, 20 bp, synthetic construct
  source 1..20: mol_type = other DNA; note = Description of Artificial Sequence: Synthetic oligonucleotide
tttagaaagcaggcatgtcc

SEQ ID NO: 25373 - DNA, 20 bp, synthetic construct
  source 1..20: mol_type = other DNA; note = Description of Artificial Sequence: Synthetic oligonucleotide
ttttagaaagcaggcatgtc

SEQ ID NO: 25374 - DNA, 20 bp, synthetic construct
  source 1..20: mol_type = other DNA; note = Description of Artificial Sequence: Synthetic oligonucleotide
tttttagaaagcaggcatgt

SEQ ID NO: 25375 - DNA, 20 bp, synthetic construct
  source 1..20: mol_type = other DNA; note = Description of Artificial Sequence: Synthetic oligonucleotide
atttttagaaagcaggcatg

SEQ ID NO: 25376 - DNA, 20 bp, synthetic construct
  source 1..20: mol_type = other DNA; note = Description of Artificial Sequence: Synthetic oligonucleotide
gatttttagaaagcaggcat

SEQ ID NO: 25377 - DNA, 20 bp, synthetic construct
  source 1..20: mol_type = other DNA; note = Description of Artificial Sequence: Synthetic oligonucleotide
agatttttagaaagcaggca

SEQ ID NO: 25378 - DNA, 20 bp, synthetic construct
  source 1..20: mol_type = other DNA; note = Description of Artificial Sequence: Synthetic oligonucleotide
aagatttttagaaagcaggc

SEQ ID NO: 25379 - DNA, 20 bp, synthetic construct
  source 1..20: mol_type = other DNA; note = Description of Artificial Sequence: Synthetic oligonucleotide
gaagatttttagaaagcagg

SEQ ID NO: 25380 - DNA, 20 bp, synthetic construct
  source 1..20: mol_type = other DNA; note = Description of Artificial Sequence: Synthetic oligonucleotide
ggaagatttttagaaagcag

SEQ ID NO: 25381 - DNA, 20 bp, synthetic construct
  source 1..20: mol_type = other DNA; note = Description of Artificial Sequence: Synthetic oligonucleotide
aggaagatttttagaaagca

SEQ ID NO: 25382 - DNA, 20 bp, synthetic construct
  source 1..20: mol_type = other DNA; note = Description of Artificial Sequence: Synthetic oligonucleotide
gaggaagatttttagaaagc

SEQ ID NO: 25383 - DNA, 20 bp, synthetic construct
  source 1..20: mol_type = other DNA; note = Description of Artificial Sequence: Synthetic oligonucleotide
agaggaagatttttagaaag

SEQ ID NO: 25384 - DNA, 20 bp, synthetic construct
  source 1..20: mol_type = other DNA; note = Description of Artificial Sequence: Synthetic oligonucleotide
cagaggaagatttttagaaa

SEQ ID NO: 25385 - DNA, 20 bp, synthetic construct
  source 1..20: mol_type = other DNA; note = Description of Artificial Sequence: Synthetic oligonucleotide
tcagaggaagatttttagaa

SEQ ID NO: 25386 - DNA, 20 bp, synthetic construct
  source 1..20: mol_type = other DNA; note = Description of Artificial Sequence: Synthetic oligonucleotide
ttcagaggaagatttttaga

SEQ ID NO: 25387 - DNA, 20 bp, synthetic construct
  source 1..20: mol_type = other DNA; note = Description of Artificial Sequence: Synthetic oligonucleotide
cttcagaggaagatttttag

SEQ ID NO: 25388 - DNA, 20 bp, synthetic construct
  source 1..20: mol_type = other DNA; note = Description of Artificial Sequence: Synthetic oligonucleotide
tcttcagaggaagattttta

SEQ ID NO: 25389 - DNA, 20 bp, synthetic construct
  source 1..20: mol_type = other DNA; note = Description of Artificial Sequence: Synthetic oligonucleotide
gtcttcagaggaagattttt

SEQ ID NO: 25390 - DNA, 20 bp, synthetic construct
  source 1..20: mol_type = other DNA; note = Description of Artificial Sequence: Synthetic oligonucleotide
ggtcttcagaggaagatttt

SEQ ID NO: 25391 - DNA, 20 bp, synthetic construct
  source 1..20: mol_type = other DNA; note = Description of Artificial Sequence: Synthetic oligonucleotide
aggtcttcagaggaagattt

SEQ ID NO: 25392 - DNA, 20 bp, synthetic construct
  source 1..20: mol_type = other DNA; note = Description of Artificial Sequence: Synthetic oligonucleotide
caggtcttcagaggaagatt

SEQ ID NO: 25393 - DNA, 20 bp, synthetic construct
  source 1..20: mol_type = other DNA; note = Description of Artificial Sequence: Synthetic oligonucleotide
tcaggtcttcagaggaagat

SEQ ID NO: 25394 - DNA, 20 bp, synthetic construct
  source 1..20: mol_type = other DNA; note = Description of Artificial Sequence: Synthetic oligonucleotide
gtcaggtcttcagaggaaga

SEQ ID NO: 25395 - DNA, 20 bp, synthetic construct
  source 1..20: mol_type = other DNA; note = Description of Artificial Sequence: Synthetic oligonucleotide
ggtcaggtcttcagaggaag

SEQ ID NO: 25396 - DNA, 20 bp, synthetic construct
  source 1..20: mol_type = other DNA; note = Description of Artificial Sequence: Synthetic oligonucleotide
gggtcaggtcttcagaggaa

SEQ ID NO: 25397 - DNA, 20 bp, synthetic construct
  source 1..20: mol_type = other DNA; note = Description of Artificial Sequence: Synthetic oligonucleotide
tgggtcaggtcttcagagga

SEQ ID NO: 25398 - DNA, 20 bp, synthetic construct
  source 1..20: mol_type = other DNA; note = Description of Artificial Sequence: Synthetic oligonucleotide
ttgggtcaggtcttcagagg

SEQ ID NO: 25399 - DNA, 20 bp, synthetic construct
  source 1..20: mol_type = other DNA; note = Description of Artificial Sequence: Synthetic oligonucleotide
cttgggtcaggtcttcagag

SEQ ID NO: 25400 - DNA, 20 bp, synthetic construct
  source 1..20: mol_type = other DNA; note = Description of Artificial Sequence: Synthetic oligonucleotide
gcttgggtcaggtcttcaga

SEQ ID NO: 25401 - DNA, 20 bp, synthetic construct
  source 1..20: mol_type = other DNA; note = Description of Artificial Sequence: Synthetic oligonucleotide
agcttgggtcaggtcttcag

SEQ ID NO: 25402 - DNA, 20 bp, synthetic construct
  source 1..20: mol_type = other DNA; note = Description of Artificial Sequence: Synthetic oligonucleotide
gagcttgggtcaggtcttca

SEQ ID NO: 25403 - DNA, 20 bp, synthetic construct
  source 1..20: mol_type = other DNA; note = Description of Artificial Sequence: Synthetic oligonucleotide
agagcttgggtcaggtcttc

SEQ ID NO: 25404 - DNA, 20 bp, synthetic construct
  source 1..20: mol_type = other DNA; note = Description of Artificial Sequence: Synthetic oligonucleotide
aagagcttgggtcaggtctt

SEQ ID NO: 25405 - DNA, 20 bp, synthetic construct
  source 1..20: mol_type = other DNA; note = Description of Artificial Sequence: Synthetic oligonucleotide
taagagcttgggtcaggtct

SEQ ID NO: 25406 - DNA, 20 bp, synthetic construct
  source 1..20: mol_type = other DNA; note = Description of Artificial Sequence: Synthetic oligonucleotide
ttaagagcttgggtcaggtc

SEQ ID NO: 25407 - DNA, 20 bp, synthetic construct
  source 1..20: mol_type = other DNA; note = Description of Artificial Sequence: Synthetic oligonucleotide
tttaagagcttgggtcaggt

SEQ ID NO: 25408 - DNA, 20 bp, synthetic construct
  source 1..20: mol_type = other DNA; note = Description of Artificial Sequence: Synthetic oligonucleotide
atttaagagcttgggtcagg

SEQ ID NO: 25409 - DNA, 20 bp, synthetic construct
  source 1..20: mol_type = other DNA; note = Description of Artificial Sequence: Synthetic oligonucleotide
catttaagagcttgggtcag

SEQ ID NO: 25410 - DNA, 20 bp, synthetic construct
  source 1..20: mol_type = other DNA; note = Description of Artificial Sequence: Synthetic oligonucleotide
gcatttaagagcttgggtca

SEQ ID NO: 25411 - DNA, 20 bp, synthetic construct
  source 1..20: mol_type = other DNA; note = Description of Artificial Sequence: Synthetic oligonucleotide
agcatttaagagcttgggtc

SEQ ID NO: 25412 - DNA, 20 bp, synthetic construct
  source 1..20: mol_type = other DNA; note = Description of Artificial Sequence: Synthetic oligonucleotide
tagcatttaagagcttgggt

SEQ ID NO: 25413 - DNA, 20 bp, synthetic construct
  source 1..20: mol_type = other DNA; note = Description of Artificial Sequence: Synthetic oligonucleotide
atagcatttaagagcttggg

SEQ ID NO: 25414 - DNA, 20 bp, synthetic construct
  source 1..20: mol_type = other DNA; note = Description of Artificial Sequence: Synthetic oligonucleotide
aatagcatttaagagcttgg

SEQ ID NO: 25415 - DNA, 20 bp, synthetic construct
  source 1..20: mol_type = other DNA; note = Description of Artificial Sequence: Synthetic oligonucleotide
caatagcatttaagagcttg

SEQ ID NO: 25416 - DNA, 20 bp, synthetic construct
  source 1..20: mol_type = other DNA; note = Description of Artificial Sequence: Synthetic oligonucleotide
acaatagcatttaagagctt

SEQ ID NO: 25417 - DNA, 20 bp, synthetic construct
  source 1..20: mol_type = other DNA; note = Description of Artificial Sequence: Synthetic oligonucleotide
tacaatagcatttaagagct

SEQ ID NO: 25418 - DNA, 20 bp, synthetic construct
  source 1..20: mol_type = other DNA; note = Description of Artificial Sequence: Synthetic oligonucleotide
ttacaatagcatttaagagc

SEQ ID NO: 25419 - DNA, 20 bp, synthetic construct
  source 1..20: mol_type = other DNA; note = Description of Artificial Sequence: Synthetic oligonucleotide
cttacaatagcatttaagag

SEQ ID NO: 25420 - DNA, 20 bp, synthetic construct
  source 1..20: mol_type = other DNA; note = Description of Artificial Sequence: Synthetic oligonucleotide
tcttacaatagcatttaaga

SEQ ID NO: 25421 - DNA, 20 bp, synthetic construct
  source 1..20: mol_type = other DNA; note = Description of Artificial Sequence: Synthetic oligonucleotide
ctcttacaatagcatttaag

SEQ ID NO: 25422 - DNA, 20 bp, synthetic construct
  source 1..20: mol_type = other DNA; note = Description of Artificial Sequence: Synthetic oligonucleotide
tctcttacaatagcatttaa

SEQ ID NO: 25423 - DNA, 20 bp, synthetic construct
  source 1..20: mol_type = other DNA; note = Description of Artificial Sequence: Synthetic oligonucleotide
ttctcttacaatagcattta

SEQ ID NO: 25424 - DNA, 20 bp, synthetic construct
  source 1..20: mol_type = other DNA; note = Description of Artificial Sequence: Synthetic oligonucleotide
tttctcttacaatagcattt

SEQ ID NO: 25425 - DNA, 20 bp, synthetic construct
  source 1..20: mol_type = other DNA; note = Description of Artificial Sequence: Synthetic oligonucleotide
atttctcttacaatagcatt

SEQ ID NO: 25426 - DNA, 20 bp, synthetic construct
  source 1..20: mol_type = other DNA; note = Description of Artificial Sequence: Synthetic oligonucleotide
aatttctcttacaatagcat

SEQ ID NO: 25427 - DNA, 20 bp, synthetic construct
  source 1..20: mol_type = other DNA; note = Description of Artificial Sequence: Synthetic oligonucleotide
aaatttctcttacaatagca

SEQ ID NO: 25428 - DNA, 20 bp, synthetic construct
  source 1..20: mol_type = other DNA; note = Description of Artificial Sequence: Synthetic oligonucleotide
gaaatttctcttacaatagc

SEQ ID NO: 25429 - DNA, 20 bp, synthetic construct
  source 1..20: mol_type = other DNA; note = Description of Artificial Sequence: Synthetic oligonucleotide
agaaatttctcttacaatag

SEQ ID NO: 25430 - DNA, 20 bp, synthetic construct
  source 1..20: mol_type = other DNA; note = Description of Artificial Sequence: Synthetic oligonucleotide
aagaaatttctcttacaata

SEQ ID NO: 25431 - DNA, 20 bp, synthetic construct
  source 1..20: mol_type = other DNA; note = Description of Artificial Sequence: Synthetic oligonucleotide
aaagaaatttctcttacaat

SEQ ID NO: 25432 - DNA, 20 bp, synthetic construct
  source 1..20: mol_type = other DNA; note = Description of Artificial Sequence: Synthetic oligonucleotide
caaagaaatttctcttacaa

SEQ ID NO: 25433 - DNA, 20 bp, synthetic construct
  source 1..20: mol_type = other DNA; note = Description of Artificial Sequence: Synthetic oligonucleotide
acaaagaaatttctcttaca

SEQ ID NO: 25434 - DNA, 20 bp, synthetic construct
  source 1..20: mol_type = other DNA; note = Description of Artificial Sequence: Synthetic oligonucleotide
gacaaagaaatttctcttac

SEQ ID NO: 25435 - DNA, 20 bp, synthetic construct
  source 1..20: mol_type = other DNA; note = Description of Artificial Sequence: Synthetic oligonucleotide
agacaaagaaatttctctta

SEQ ID NO: 25436 - DNA, 20 bp, synthetic construct
  source 1..20: mol_type = other DNA; note = Description of Artificial Sequence: Synthetic oligonucleotide
tagacaaagaaatttctctt

SEQ ID NO: 25437 - DNA, 20 bp, synthetic construct
  source 1..20: mol_type = other DNA; note = Description of Artificial Sequence: Synthetic oligonucleotide
atagacaaagaaatttctct

SEQ ID NO: 25438 - DNA, 20 bp, synthetic construct
  source 1..20: mol_type = other DNA; note = Description of Artificial Sequence: Synthetic oligonucleotide
aatagacaaagaaatttctc

SEQ ID NO: 25439 - DNA, 20 bp, synthetic construct
  source 1..20: mol_type = other DNA; note = Description of Artificial Sequence: Synthetic oligonucleotide
taatagacaaagaaatttct

SEQ ID NO: 25440 - DNA, 20 bp, synthetic construct
  source 1..20: mol_type = other DNA; note = Description of Artificial Sequence: Synthetic oligonucleotide
ttaatagacaaagaaatttc

SEQ ID NO: 25441 - DNA, 20 bp, synthetic construct
  source 1..20: mol_type = other DNA; note = Description of Artificial Sequence: Synthetic oligonucleotide
gttaatagacaaagaaattt

SEQ ID NO: 25442 - DNA, 20 bp, synthetic construct
  source 1..20: mol_type = other DNA; note = Description of Artificial Sequence: Synthetic oligonucleotide
agttaatagacaaagaaatt

SEQ ID NO: 25443 - DNA, 20 bp, synthetic construct
  source 1..20: mol_type = other DNA; note = Description of Artificial Sequence: Synthetic oligonucleotide
gagttaatagacaaagaaat

SEQ ID NO: 25444 - DNA, 20 bp, synthetic construct
  source 1..20: mol_type = other DNA; note = Description of Artificial Sequence: Synthetic oligonucleotide
ggagttaatagacaaagaaa

SEQ ID NO: 25445 - DNA, 20 bp, synthetic construct
  source 1..20: mol_type = other DNA; note = Description of Artificial Sequence: Synthetic oligonucleotide
tggagttaatagacaaagaa

SEQ ID NO: 25446 - DNA, 20 bp, synthetic construct
  source 1..20: mol_type = other DNA; note = Description of Artificial Sequence: Synthetic oligonucleotide
atggagttaatagacaaaga

SEQ ID NO: 25447 - DNA, 20 bp, synthetic construct
  source 1..20: mol_type = other DNA; note = Description of Artificial Sequence: Synthetic oligonucleotide
aatggagttaatagacaaag

SEQ ID NO: 25448 - DNA, 20 bp, synthetic construct
  source 1..20: mol_type = other DNA; note = Description of Artificial Sequence: Synthetic oligonucleotide
aaatggagttaatagacaaa

SEQ ID NO: 25449 - DNA, 20 bp, synthetic construct
  source 1..20: mol_type = other DNA; note = Description of Artificial Sequence: Synthetic oligonucleotide
aaaatggagttaatagacaa

SEQ ID NO: 25450 - DNA, 20 bp, synthetic construct
  source 1..20: mol_type = other DNA; note = Description of Artificial Sequence: Synthetic oligonucleotide
taaaatggagttaatagaca

SEQ ID NO: 25451 - DNA, 20 bp, synthetic construct
  source 1..20: mol_type = other DNA; note = Description of Artificial Sequence: Synthetic oligonucleotide
ctaaaatggagttaatagac

SEQ ID NO: 25452 - DNA, 20 bp, synthetic construct
  source 1..20: mol_type = other DNA; note = Description of Artificial Sequence: Synthetic oligonucleotide
actaaaatggagttaataga

SEQ ID NO: 25453 - DNA, 20 bp, synthetic construct
  source 1..20: mol_type = other DNA; note = Description of Artificial Sequence: Synthetic oligonucleotide
tactaaaatggagttaatag

SEQ ID NO: 25454 - DNA, 20 bp, synthetic construct
  source 1..20: mol_type = other DNA; note = Description of Artificial Sequence: Synthetic oligonucleotide
ctactaaaatggagttaata

SEQ ID NO: 25455 - DNA, 20 bp, synthetic construct
  source 1..20: mol_type = other DNA; note = Description of Artificial Sequence: Synthetic oligonucleotide
cctactaaaatggagttaat

SEQ ID NO: 25456 - DNA, 20 bp, synthetic construct
  source 1..20: mol_type = other DNA; note = Description of Artificial Sequence: Synthetic oligonucleotide
ccctactaaaatggagttaa

SEQ ID NO: 25457 - DNA, 20 bp, synthetic construct
  source 1..20: mol_type = other DNA; note = Description of Artificial Sequence: Synthetic oligonucleotide
tccctactaaaatggagtta

SEQ ID NO: 25458 - DNA, 20 bp, synthetic construct
  source 1..20: mol_type = other DNA; note = Description of Artificial Sequence: Synthetic oligonucleotide
atccctactaaaatggagtt

SEQ ID NO: 25459 - DNA, 20 bp, synthetic construct
  source 1..20: mol_type = other DNA; note = Description of Artificial Sequence: Synthetic oligonucleotide
aatccctactaaaatggagt

SEQ ID NO: 25460 - DNA, 20 bp, synthetic construct
  source 1..20: mol_type = other DNA; note = Description of Artificial Sequence: Synthetic oligonucleotide
gaatccctactaaaatggag

SEQ ID NO: 25461 - DNA, 20 bp, synthetic construct
  source 1..20: mol_type = other DNA; note = Description of Artificial Sequence: Synthetic oligonucleotide
tgaatccctactaaaatgga

SEQ ID NO: 25462 - DNA, 20 bp, synthetic construct
  source 1..20: mol_type = other DNA; note = Description of Artificial Sequence: Synthetic oligonucleotide
gtgaatccctactaaaatgg

SEQ ID NO: 25463 - DNA, 20 bp, synthetic construct
  source 1..20: mol_type = other DNA; note = Description of Artificial Sequence: Synthetic oligonucleotide
agtgaatccctactaaaatg

SEQ ID NO: 25464 - DNA, 20 bp, synthetic construct
  source 1..20: mol_type = other DNA; note = Description of Artificial Sequence: Synthetic oligonucleotide
cagtgaatccctactaaaat

SEQ ID NO: 25465 - DNA, 20 bp, synthetic construct
  source 1..20: mol_type = other DNA; note = Description of Artificial Sequence: Synthetic oligonucleotide
tcagtgaatccctactaaaa

SEQ ID NO: 25466 - DNA, 20 bp, synthetic construct
  source 1..20: mol_type = other DNA; note = Description of Artificial Sequence: Synthetic oligonucleotide
gtcagtgaatccctactaaa

SEQ ID NO: 25467 - DNA, 20 bp, synthetic construct
  source 1..20: mol_type = other DNA; note = Description of Artificial Sequence: Synthetic oligonucleotide
agtcagtgaatccctactaa

SEQ ID NO: 25468 - DNA, 20 bp, synthetic construct
  source 1..20: mol_type = other DNA; note = Description of Artificial Sequence: Synthetic oligonucleotide
tagtcagtgaatccctacta

SEQ ID NO: 25469 - DNA, 20 bp, synthetic construct
  source 1..20: mol_type = other DNA; note = Description of Artificial Sequence: Synthetic oligonucleotide
ctagtcagtgaatccctact

SEQ ID NO: 25470 - DNA, 20 bp, synthetic construct
  source 1..20: mol_type = other DNA; note = Description of Artificial Sequence: Synthetic oligonucleotide
tctagtcagtgaatccctac

SEQ ID NO: 25471 - DNA, 20 bp, synthetic construct
  source 1..20: mol_type = other DNA; note = Description of Artificial Sequence: Synthetic oligonucleotide
atctagtcagtgaatcccta

SEQ ID NO: 25472 - DNA, 20 bp, synthetic construct
  source 1..20: mol_type = other DNA; note = Description of Artificial Sequence: Synthetic oligonucleotide
aatctagtcagtgaatccct

SEQ ID NO: 25473 - DNA, 20 bp, synthetic construct
  source 1..20: mol_type = other DNA; note = Description of Artificial Sequence: Synthetic oligonucleotide
aaatctagtcagtgaatccc

SEQ ID NO: 25474 - DNA, 20 bp, synthetic construct
  source 1..20: mol_type = other DNA; note = Description of Artificial Sequence: Synthetic oligonucleotide
aaaatctagtcagtgaatcc

SEQ ID NO: 25475 - DNA, 20 bp, synthetic construct
  source 1..20: mol_type = other DNA; note = Description of Artificial Sequence: Synthetic oligonucleotide
taaaatctagtcagtgaatc

SEQ ID NO: 25476 - DNA, 20 bp, synthetic construct
  source 1..20: mol_type = other DNA; note = Description of Artificial Sequence: Synthetic oligonucleotide
gtaaaatctagtcagtgaat

SEQ ID NO: 25477 - DNA, 20 bp, synthetic construct
  source 1..20: mol_type = other DNA; note = Description of Artificial Sequence: Synthetic oligonucleotide
agtaaaatctagtcagtgaa

SEQ ID NO: 25478 - DNA, 20 bp, synthetic construct
  source 1..20: mol_type = other DNA; note = Description of Artificial Sequence: Synthetic oligonucleotide
cagtaaaatctagtcagtga

SEQ ID NO: 25479 - DNA, 20 bp, synthetic construct
  source 1..20: mol_type = other DNA; note = Description of Artificial Sequence: Synthetic oligonucleotide
tcagtaaaatctagtcagtg

SEQ ID NO: 25480 - DNA, 20 bp, synthetic construct
  source 1..20: mol_type = other DNA; note = Description of Artificial Sequence: Synthetic oligonucleotide
ttcagtaaaatctagtcagt

SEQ ID NO: 25481 - DNA, 20 bp, synthetic construct
  source 1..20: mol_type = other DNA; note = Description of Artificial Sequence: Synthetic oligonucleotide
gttcagtaaaatctagtcag

SEQ ID NO: 25482 - DNA, 20 bp, synthetic construct
  source 1..20: mol_type = other DNA; note = Description of Artificial Sequence: Synthetic oligonucleotide
agttcagtaaaatctagtca

SEQ ID NO: 25483 - DNA, 20 bp, synthetic construct
  source 1..20: mol_type = other DNA; note = Description of Artificial Sequence: Synthetic oligonucleotide
tagttcagtaaaatctagtc

SEQ ID NO: 25484 - DNA, 20 bp, synthetic construct
  source 1..20: mol_type = other DNA; note = Description of Artificial Sequence: Synthetic oligonucleotide
atagttcagtaaaatctagt

SEQ ID NO: 25485 - DNA, 20 bp, synthetic construct
  source 1..20: mol_type = other DNA; note = Description of Artificial Sequence: Synthetic oligonucleotide
catagttcagtaaaatctag

SEQ ID NO: 25486 - DNA, 20 bp, synthetic construct
  source 1..20: mol_type = other DNA; note = Description of Artificial Sequence: Synthetic oligonucleotide
tcatagttcagtaaaatcta

SEQ ID NO: 25487 - DNA, 20 bp, synthetic construct
  source 1..20: mol_type = other DNA; note = Description of Artificial Sequence: Synthetic oligonucleotide
ttcatagttcagtaaaatct

SEQ ID NO: 25488 - DNA, 20 bp, synthetic construct
  source 1..20: mol_type = other DNA; note = Description of Artificial Sequence: Synthetic oligonucleotide
tttcatagttcagtaaaatc

SEQ ID NO: 25489 - DNA, 20 bp, synthetic construct
  source 1..20: mol_type = other DNA; note = Description of Artificial Sequence: Synthetic oligonucleotide
ttttcatagttcagtaaaat

SEQ ID NO: 25490 - DNA, 20 bp, synthetic construct
  source 1..20: mol_type = other DNA; note = Description of Artificial Sequence: Synthetic oligonucleotide
attttcatagttcagtaaaa

SEQ ID NO: 25491 - DNA, 20 bp, synthetic construct
  source 1..20: mol_type = other DNA; note = Description of Artificial Sequence: Synthetic oligonucleotide
tattttcatagttcagtaaa

SEQ ID NO: 25492 - DNA, 20 bp, synthetic construct
  source 1..20: mol_type = other DNA; note = Description of Artificial Sequence: Synthetic oligonucleotide
ttattttcatagttcagtaa

SEQ ID NO: 25493 - DNA, 20 bp, synthetic construct
  source 1..20: mol_type = other DNA; note = Description of Artificial Sequence: Synthetic oligonucleotide
tttattttcatagttcagta

SEQ ID NO: 25494 - DNA, 20 bp, synthetic construct
  source 1..20: mol_type = other DNA; note = Description of Artificial Sequence: Synthetic oligonucleotide
atttattttcatagttcagt

SEQ ID NO: 25495 - DNA, 20 bp, synthetic construct
  source 1..20: mol_type = other DNA; note = Description of Artificial Sequence: Synthetic oligonucleotide
tatttattttcatagttcag

SEQ ID NO: 25496 - DNA, 20 bp, synthetic construct
  source 1..20: mol_type = other DNA; note = Description of Artificial Sequence: Synthetic oligonucleotide
gtatttattttcatagttca

SEQ ID NO: 25497 - DNA, 20 bp, synthetic construct
  source 1..20: mol_type = other DNA; note = Description of Artificial Sequence: Synthetic oligonucleotide
tgtatttattttcatagttc

SEQ ID NO: 25498 - DNA, 20 bp, synthetic construct
  source 1..20: mol_type = other DNA; note = Description of Artificial Sequence: Synthetic oligonucleotide
gtgtatttattttcatagtt

SEQ ID NO: 25499 - DNA, 20 bp, synthetic construct
  source 1..20: mol_type = other DNA; note = Description of Artificial Sequence: Synthetic oligonucleotide
tgtgtatttattttcatagt

SEQ ID NO: 25500 - DNA, 20 bp, synthetic construct
  source 1..20: mol_type = other DNA; note = Description of Artificial Sequence: Synthetic oligonucleotide
atgtgtatttattttcatag

SEQ ID NO: 25501 - DNA, 20 bp, synthetic construct
  source 1..20: mol_type = other DNA; note = Description of Artificial Sequence: Synthetic oligonucleotide
tatgtgtatttattttcata

SEQ ID NO: 25502 - DNA, 20 bp, synthetic construct
  source 1..20: mol_type = other DNA; note = Description of Artificial Sequence: Synthetic oligonucleotide
ttatgtgtatttattttcat

SEQ ID NO: 25503 - DNA, 20 bp, synthetic construct
  source 1..20: mol_type = other DNA; note = Description of Artificial Sequence: Synthetic oligonucleotide
attatgtgtatttattttca

SEQ ID NO: 25504 - DNA, 20 bp, synthetic construct
  source 1..20: mol_type = other DNA; note = Description of Artificial Sequence: Synthetic oligonucleotide
aattatgtgtatttattttc

SEQ ID NO: 25505 - DNA, 20 bp, synthetic construct
  source 1..20: mol_type = other DNA; note = Description of Artificial Sequence: Synthetic oligonucleotide
aaattatgtgtatttatttt

SEQ ID NO: 25506 - DNA, 20 bp, synthetic construct
  source 1..20: mol_type = other DNA; note = Description of Artificial Sequence: Synthetic oligonucleotide
aaaattatgtgtatttattt

SEQ ID NO: 25507 - DNA, 20 bp, synthetic construct
  source 1..20: mol_type = other DNA; note = Description of Artificial Sequence: Synthetic oligonucleotide
aaaaattatgtgtatttatt

SEQ ID NO: 25508 - DNA, 20 bp, synthetic construct
  source 1..20: mol_type = other DNA; note = Description of Artificial Sequence: Synthetic oligonucleotide
gaaaaattatgtgtatttat

SEQ ID NO: 25509 - DNA, 20 bp, synthetic construct
  source 1..20: mol_type = other DNA; note = Description of Artificial Sequence: Synthetic oligonucleotide
tgaaaaattatgtgtattta

SEQ ID NO: 25510 - DNA, 20 bp, synthetic construct
  source 1..20: mol_type = other DNA; note = Description of Artificial Sequence: Synthetic oligonucleotide
gtgaaaaattatgtgtattt

SEQ ID NO: 25511 - DNA, 20 bp, synthetic construct
  source 1..20: mol_type = other DNA; note = Description of Artificial Sequence: Synthetic oligonucleotide
tgtgaaaaattatgtgtatt

SEQ ID NO: 25512 - DNA, 20 bp, synthetic construct
  source 1..20: mol_type = other DNA; note = Description of Artificial Sequence: Synthetic oligonucleotide
ttgtgaaaaattatgtgtat

SEQ ID NO: 25513 - DNA, 20 bp, synthetic construct
  source 1..20: mol_type = other DNA; note = Description of Artificial Sequence: Synthetic oligonucleotide
tttgtgaaaaattatgtgta

SEQ ID NO: 25514 - DNA, 20 bp, synthetic construct
  source 1..20: mol_type = other DNA; note = Description of Artificial Sequence: Synthetic oligonucleotide
ttttgtgaaaaattatgtgt

SEQ ID NO: 25515 - DNA, 20 bp, synthetic construct
  source 1..20: mol_type = other DNA; note = Description of Artificial Sequence: Synthetic oligonucleotide
attttgtgaaaaattatgtg

SEQ ID NO: 25516 - DNA, 20 bp, synthetic construct
  source 1..20: mol_type = other DNA; note = Description of Artificial Sequence: Synthetic oligonucleotide
aattttgtgaaaaattatgt

SEQ ID NO: 25517 - DNA, 20 bp, synthetic construct
  source 1..20: mol_type = other DNA; note = Description of Artificial Sequence: Synthetic oligonucleotide
aaattttgtgaaaaattatg

SEQ ID NO: 25518 - DNA, 20 bp, synthetic construct
  source 1..20: mol_type = other DNA; note = Description of Artificial Sequence: Synthetic oligonucleotide
aaaattttgtgaaaaattat

SEQ ID NO: 25519 - DNA, 20 bp, synthetic construct
  source 1..20: mol_type = other DNA; note = Description of Artificial Sequence: Synthetic oligonucleotide
caaaattttgtgaaaaatta

SEQ ID NO: 25520 - DNA, 20 bp, synthetic construct
  source 1..20: mol_type = other DNA; note = Description of Artificial Sequence: Synthetic oligonucleotide
ccaaaattttgtgaaaaatt

SEQ ID NO: 25521 - DNA, 20 bp, synthetic construct
  source 1..20: mol_type = other DNA; note = Description of Artificial Sequence: Synthetic oligonucleotide
cccaaaattttgtgaaaaat

SEQ ID NO: 25522 - DNA, 20 bp, synthetic construct
  source 1..20: mol_type = other DNA; note = Description of Artificial Sequence: Synthetic oligonucleotide
gcccaaaattttgtgaaaaa

SEQ ID NO: 25523 - DNA, 20 bp, synthetic construct
  source 1..20: mol_type = other DNA; note = Description of Artificial Sequence: Synthetic oligonucleotide
ggcccaaaattttgtgaaaa

SEQ ID NO: 25524 - DNA, 20 bp, synthetic construct
  source 1..20: mol_type = other DNA; note = Description of Artificial Sequence: Synthetic oligonucleotide
gggcccaaaattttgtgaaa

SEQ ID NO: 25525 - DNA, 20 bp, synthetic construct
  source 1..20: mol_type = other DNA; note = Description of Artificial Sequence: Synthetic oligonucleotide
tgggcccaaaattttgtgaa

SEQ ID NO: 25526 - DNA, 20 bp, synthetic construct
  source 1..20: mol_type = other DNA; note = Description of Artificial Sequence: Synthetic oligonucleotide
ttgggcccaaaattttgtga

SEQ ID NO: 25527 - DNA, 20 bp, synthetic construct
  source 1..20: mol_type = other DNA; note = Description of Artificial Sequence: Synthetic oligonucleotide
attgggcccaaaattttgtg

SEQ ID NO: 25528 - DNA, 20 bp, synthetic construct
  source 1..20: mol_type = other DNA; note = Description of Artificial Sequence: Synthetic oligonucleotide
aattgggcccaaaattttgt

SEQ ID NO: 25529 - DNA, 20 bp, synthetic construct
  source 1..20: mol_type = other DNA; note = Description of Artificial Sequence: Synthetic oligonucleotide
gaattgggcccaaaattttg

SEQ ID NO: 25530 - DNA, 20 bp, synthetic construct
  source 1..20: mol_type = other DNA; note = Description of Artificial Sequence: Synthetic oligonucleotide
ggaattgggcccaaaatttt

SEQ ID NO: 25531 - DNA, 20 bp, synthetic construct
  source 1..20: mol_type = other DNA; note = Description of Artificial Sequence: Synthetic oligonucleotide
gggaattgggcccaaaattt

SEQ ID NO: 25532 - DNA, 20 bp, synthetic construct
  source 1..20: mol_type = other DNA; note = Description of Artificial Sequence: Synthetic oligonucleotide
ggggaattgggcccaaaatt

SEQ ID NO: 25533 - DNA, 20 bp, synthetic construct
  source 1..20: mol_type = other DNA; note = Description of Artificial Sequence: Synthetic oligonucleotide
aggggaattgggcccaaaat

SEQ ID NO: 25534 - DNA, 20 bp, synthetic construct
  source 1..20: mol_type = other DNA; note = Description of Artificial Sequence: Synthetic oligonucleotide
taggggaattgggcccaaaa

SEQ ID NO: 25535 - DNA, 20 bp, synthetic construct
  source 1..20: mol_type = other DNA; note = Description of Artificial Sequence: Synthetic oligonucleotide
ttaggggaattgggcccaaa

SEQ ID NO: 25536 - DNA, 20 bp, synthetic construct
  source 1..20: mol_type = other DNA; note = Description of Artificial Sequence: Synthetic oligonucleotide
tttaggggaattgggcccaa

SEQ ID NO: 25537 - DNA, 20 bp, synthetic construct
  source 1..20: mol_type = other DNA; note = Description of Artificial Sequence: Synthetic oligonucleotide
ttttaggggaattgggccca

SEQ ID NO: 25538 - DNA, 20 bp, synthetic construct
  source 1..20: mol_type = other DNA; note = Description of Artificial Sequence: Synthetic oligonucleotide
cttttaggggaattgggccc

SEQ ID NO: 25539 - DNA, 20 bp, synthetic construct
  source 1..20: mol_type = other DNA; note = Description of Artificial Sequence: Synthetic oligonucleotide
tcttttaggggaattgggcc

SEQ ID NO: 25540 - DNA, 20 bp, synthetic construct
  source 1..20: mol_type = other DNA; note = Description of Artificial Sequence: Synthetic oligonucleotide
ttcttttaggggaattgggc

SEQ ID NO: 25541 - DNA, 20 bp, synthetic construct
  source 1..20: mol_type = other DNA; note = Description of Artificial Sequence: Synthetic oligonucleotide
attcttttaggggaattggg

SEQ ID NO: 25542 - DNA, 20 bp, synthetic construct
  source 1..20: mol_type = other DNA; note = Description of Artificial Sequence: Synthetic oligonucleotide
aattcttttaggggaattgg

SEQ ID NO: 25543 - DNA, 20 bp, synthetic construct
  source 1..20: mol_type = other DNA; note = Description of Artificial Sequence: Synthetic oligonucleotide
caattcttttaggggaattg

SEQ ID NO: 25544 - DNA, 20 bp, synthetic construct
  source 1..20: mol_type = other DNA; note = Description of Artificial Sequence: Synthetic oligonucleotide
tcaattcttttaggggaatt

SEQ ID NO: 25545 - DNA, 20 bp, synthetic construct
  source 1..20: mol_type = other DNA; note = Description of Artificial Sequence: Synthetic oligonucleotide
ctcaattcttttaggggaat

SEQ ID NO: 25546 - DNA, 20 bp, synthetic construct
  source 1..20: mol_type = other DNA; note = Description of Artificial Sequence: Synthetic oligonucleotide
cctcaattcttttaggggaa

SEQ ID NO: 25547 - DNA, 20 bp, synthetic construct
  source 1..20: mol_type = other DNA; note = Description of Artificial Sequence: Synthetic oligonucleotide
tcctcaattcttttagggga

SEQ ID NO: 25548 - DNA, 20 bp, synthetic construct
  source 1..20: mol_type = other DNA; note = Description of Artificial Sequence: Synthetic oligonucleotide
atcctcaattcttttagggg

SEQ ID NO: 25549 - DNA, 20 bp, synthetic construct
  source 1..20: mol_type = other DNA; note = Description of Artificial Sequence: Synthetic oligonucleotide
aatcctcaattcttttaggg

SEQ ID NO: 25550 - DNA, 20 bp, synthetic construct
  source 1..20: mol_type = other DNA; note = Description of Artificial Sequence: Synthetic oligonucleotide
taatcctcaattcttttagg

SEQ ID NO: 25551 - DNA, 20 bp, synthetic construct
  source 1..20: mol_type = other DNA; note = Description of Artificial Sequence: Synthetic oligonucleotide
ctaatcctcaattcttttag

SEQ ID NO: 25552 - DNA, 20 bp, synthetic construct
  source 1..20: mol_type = other DNA; note = Description of Artificial Sequence: Synthetic oligonucleotide
cctaatcctcaattctttta

SEQ ID NO: 25553 - DNA, 20 bp, synthetic construct
  source 1..20: mol_type = other DNA; note = Description of Artificial Sequence: Synthetic oligonucleotide
ccctaatcctcaattctttt

SEQ ID NO: 25554 - DNA, 20 bp, synthetic construct
  source 1..20: mol_type = other DNA; note = Description of Artificial Sequence: Synthetic oligonucleotide
tccctaatcctcaattcttt

SEQ ID NO: 25555 - DNA, 20 bp, synthetic construct
  source 1..20: mol_type = other DNA; note = Description of Artificial Sequence: Synthetic oligonucleotide
ctccctaatcctcaattctt

SEQ ID NO: 25556 - DNA, 20 bp, synthetic construct
  source 1..20: mol_type = other DNA; note = Description of Artificial Sequence: Synthetic oligonucleotide
tctccctaatcctcaattct

SEQ ID NO: 25557 - DNA, 20 bp, synthetic construct
  source 1..20: mol_type = other DNA; note = Description of Artificial Sequence: Synthetic oligonucleotide
ttctccctaatcctcaattc

SEQ ID NO: 25558 - DNA, 20 bp, synthetic construct
  source 1..20: mol_type = other DNA; note = Description of Artificial Sequence: Synthetic oligonucleotide
tttctccctaatcctcaatt

SEQ ID NO: 25559 - DNA, 20 bp, synthetic construct
  source 1..20: mol_type = other DNA; note = Description of Artificial Sequence: Synthetic oligonucleotide
ctttctccctaatcctcaat

SEQ ID NO: 25560 - DNA, 20 bp, synthetic construct
  source 1..20: mol_type = other DNA; note = Description of Artificial Sequence: Synthetic oligonucleotide
cctttctccctaatcctcaa

SEQ ID NO: 25561 - DNA, 20 bp, synthetic construct
  source 1..20: mol_type = other DNA; note = Description of Artificial Sequence: Synthetic oligonucleotide
tcctttctccctaatcctca

SEQ ID NO: 25562 - DNA, 20 bp, synthetic construct
  source 1..20: mol_type = other DNA; note = Description of Artificial Sequence: Synthetic oligonucleotide
ctcctttctccctaatcctc

SEQ ID NO: 25563 - DNA, 20 bp, synthetic construct
  source 1..20: mol_type = other DNA; note = Description of Artificial Sequence: Synthetic oligonucleotide
tctcctttctccctaatcct

SEQ ID NO: 25564 - DNA, 20 bp, synthetic construct
  source 1..20: mol_type = other DNA; note = Description of Artificial Sequence: Synthetic oligonucleotide
gtctcctttctccctaatcc

SEQ ID NO: 25565 - DNA, 20 bp, synthetic construct
  source 1..20: mol_type = other DNA; note = Description of Artificial Sequence: Synthetic oligonucleotide
tgtctcctttctccctaatc

SEQ ID NO: 25566 - DNA, 20 bp, synthetic construct
  source 1..20: mol_type = other DNA; note = Description of Artificial Sequence: Synthetic oligonucleotide
ttgtctcctttctccctaat

SEQ ID NO: 25567 - DNA, 20 bp, synthetic construct
  source 1..20: mol_type = other DNA; note = Description of Artificial Sequence: Synthetic oligonucleotide
gttgtctcctttctccctaa

SEQ ID NO: 25568 - DNA, 20 bp, synthetic construct
  source 1..20: mol_type = other DNA; note = Description of Artificial Sequence: Synthetic oligonucleotide
agttgtctcctttctcccta

SEQ ID NO: 25569 - DNA, 20 bp, synthetic construct
  source 1..20: mol_type = other DNA; note = Description of Artificial Sequence: Synthetic oligonucleotide
gagttgtctcctttctccct

SEQ ID NO: 25570 - DNA, 20 bp, synthetic construct
  source 1..20: mol_type = other DNA; note = Description of Artificial Sequence: Synthetic oligonucleotide
tgagttgtctcctttctccc

SEQ ID NO: 25571 - DNA, 20 bp, synthetic construct
  source 1..20: mol_type = other DNA; note = Description of Artificial Sequence: Synthetic oligonucleotide
ttgagttgtctcctttctcc

SEQ ID NO: 25572 - DNA, 20 bp, synthetic construct
  source 1..20: mol_type = other DNA; note = Description of Artificial Sequence: Synthetic oligonucleotide
tttgagttgtctcctttctc

SEQ ID NO: 25573 - DNA, 20 bp, synthetic construct
  source 1..20: mol_type = other DNA; note = Description of Artificial Sequence: Synthetic oligonucleotide
ctttgagttgtctcctttct

SEQ ID NO: 25574 - DNA, 20 bp, synthetic construct
  source 1..20: mol_type = other DNA; note = Description of Artificial Sequence: Synthetic oligonucleotide
actttgagttgtctcctttc

SEQ ID NO: 25575 - DNA, 20 bp, synthetic construct
  source 1..20: mol_type = other DNA; note = Description of Artificial Sequence: Synthetic oligonucleotide
gactttgagttgtctccttt

SEQ ID NO: 25576 - DNA, 20 bp, synthetic construct
  source 1..20: mol_type = other DNA; note = Description of Artificial Sequence: Synthetic oligonucleotide
tgactttgagttgtctcctt

SEQ ID NO: 25577 - DNA, 20 bp, synthetic construct
  source 1..20: mol_type = other DNA; note = Description of Artificial Sequence: Synthetic oligonucleotide
atgactttgagttgtctcct

SEQ ID NO: 25578 - DNA, 20 bp, synthetic construct
  source 1..20: mol_type = other DNA; note = Description of Artificial Sequence: Synthetic oligonucleotide
gatgactttgagttgtctcc

SEQ ID NO: 25579 - DNA, 20 bp, synthetic construct
  source 1..20: mol_type = other DNA; note = Description of Artificial Sequence: Synthetic oligonucleotide
ggatgactttgagttgtctc

SEQ ID NO: 25580 - DNA, 20 bp, synthetic construct
  source 1..20: mol_type = other DNA; note = Description of Artificial Sequence: Synthetic oligonucleotide
gggatgactttgagttgtct

SEQ ID NO: 25581 - DNA, 20 bp, synthetic construct
  source 1..20: mol_type = other DNA; note = Description of Artificial Sequence: Synthetic oligonucleotide
tgggatgactttgagttgtc

SEQ ID NO: 25582 - DNA, 20 bp, synthetic construct
  source 1..20: mol_type = other DNA; note = Description of Artificial Sequence: Synthetic oligonucleotide
atgggatgactttgagttgt

SEQ ID NO: 25583 - DNA, 20 bp, synthetic construct
  source 1..20: mol_type = other DNA; note = Description of Artificial Sequence: Synthetic oligonucleotide
aatgggatgactttgagttg

SEQ ID NO: 25584 - DNA, 20 bp, synthetic construct
  source 1..20: mol_type = other DNA; note = Description of Artificial Sequence: Synthetic oligonucleotide
taatgggatgactttgagtt

SEQ ID NO: 25585 - DNA, 20 bp, synthetic construct
  source 1..20: mol_type = other DNA; note = Description of Artificial Sequence: Synthetic oligonucleotide
ttaatgggatgactttgagt

SEQ ID NO: 25586 - DNA, 20 bp, synthetic construct
  source 1..20: mol_type = other DNA; note = Description of Artificial Sequence: Synthetic oligonucleotide
cttaatgggatgactttgag

SEQ ID NO: 25587 - DNA, 20 bp, synthetic construct
  source 1..20: mol_type = other DNA; note = Description of Artificial Sequence: Synthetic oligonucleotide
acttaatgggatgactttga

SEQ ID NO: 25588 - DNA, 20 bp, synthetic construct
  source 1..20: mol_type = other DNA; note = Description of Artificial Sequence: Synthetic oligonucleotide
cacttaatgggatgactttg

SEQ ID NO: 25589 - DNA, 20 bp, synthetic construct
  source 1..20: mol_type = other DNA; note = Description of Artificial Sequence: Synthetic oligonucleotide
gcacttaatgggatgacttt

SEQ ID NO: 25590 - DNA, 20 bp, synthetic construct
  source 1..20: mol_type = other DNA; note = Description of Artificial Sequence: Synthetic oligonucleotide
tgcacttaatgggatgactt

SEQ ID NO: 25591 - DNA, 20 bp, synthetic construct
  source 1..20: mol_type = other DNA; note = Description of Artificial Sequence: Synthetic oligonucleotide
ctgcacttaatgggatgact

SEQ ID NO: 25592 - DNA, 20 bp, synthetic construct
  source 1..20: mol_type = other DNA; note = Description of Artificial Sequence: Synthetic oligonucleotide
actgcacttaatgggatgac

SEQ ID NO: 25593 - DNA, 20 bp, synthetic construct
  source 1..20: mol_type = other DNA; note = Description of Artificial Sequence: Synthetic oligonucleotide
aactgcacttaatgggatga

SEQ ID NO: 25594 - DNA, 20 bp, synthetic construct
  source 1..20: mol_type = other DNA; note = Description of Artificial Sequence: Synthetic oligonucleotide
aaactgcacttaatgggatg

SEQ ID NO: 25595 - DNA, 20 bp, synthetic construct
  source 1..20: mol_type = other DNA; note = Description of Artificial Sequence: Synthetic oligonucleotide
gaaactgcacttaatgggat

SEQ ID NO: 25596 - DNA, 20 bp, synthetic construct
  source 1..20: mol_type = other DNA; note = Description of Artificial Sequence: Synthetic oligonucleotide
agaaactgcacttaatggga

SEQ ID NO: 25597 - DNA, 20 bp, synthetic construct
  source 1..20: mol_type = other DNA; note = Description of Artificial Sequence: Synthetic oligonucleotide
aagaaactgcacttaatggg

SEQ ID NO: 25598 - DNA, 20 bp, synthetic construct
  source 1..20: mol_type = other DNA; note = Description of Artificial Sequence: Synthetic oligonucleotide
aaagaaactgcacttaatgg

SEQ ID NO: 25599 - DNA, 20 bp, synthetic construct
  source 1..20: mol_type = other DNA; note = Description of Artificial Sequence: Synthetic oligonucleotide
caaagaaactgcacttaatg

SEQ ID NO: 25600 - DNA, 20 bp, synthetic construct
  source 1..20: mol_type = other DNA; note = Description of Artificial Sequence: Synthetic oligonucleotide
tcaaagaaactgcacttaat

SEQ ID NO: 25601 - DNA, 20 bp, synthetic construct
  source 1..20: mol_type = other DNA; note = Description of Artificial Sequence: Synthetic oligonucleotide
ttcaaagaaactgcacttaa

SEQ ID NO: 25602 - DNA, 20 bp, synthetic construct
  source 1..20: mol_type = other DNA; note = Description of Artificial Sequence: Synthetic oligonucleotide
attcaaagaaactgcactta

SEQ ID NO: 25603 - DNA, 20 bp, synthetic construct
  source 1..20: mol_type = other DNA; note = Description of Artificial Sequence: Synthetic oligonucleotide
gattcaaagaaactgcactt

SEQ ID NO: 25604 - DNA, 20 bp, synthetic construct
  source 1..20: mol_type = other DNA; note = Description of Artificial Sequence: Synthetic oligonucleotide
agattcaaagaaactgcact

SEQ ID NO: 25605 - DNA, 20 bp, synthetic construct
  source 1..20: mol_type = other DNA; note = Description of Artificial Sequence: Synthetic oligonucleotide
aagattcaaagaaactgcac

SEQ ID NO: 25606 - DNA, 20 bp, synthetic construct
  source 1..20: mol_type = other DNA; note = Description of Artificial Sequence: Synthetic oligonucleotide
gaagattcaaagaaactgca

SEQ ID NO: 25607 - DNA, 20 bp, synthetic construct
  source 1..20: mol_type = other DNA; note = Description of Artificial Sequence: Synthetic oligonucleotide
agaagattcaaagaaactgc

SEQ ID NO: 25608 - DNA, 20 bp, synthetic construct
  source 1..20: mol_type = other DNA; note = Description of Artificial Sequence: Synthetic oligonucleotide
cagaagattcaaagaaactg

SEQ ID NO: 25609 - DNA, 20 bp, synthetic construct
  source 1..20: mol_type = other DNA; note = Description of Artificial Sequence: Synthetic oligonucleotide
gcagaagattcaaagaaact

SEQ ID NO: 25610 - DNA, 20 bp, synthetic construct
  source 1..20: mol_type = other DNA; note = Description of Artificial Sequence: Synthetic oligonucleotide
agcagaagattcaaagaaac

SEQ ID NO: 25611 - DNA, 20 bp, synthetic construct
  source 1..20: mol_type = other DNA; note = Description of Artificial Sequence: Synthetic oligonucleotide
aagcagaagattcaaagaaa

SEQ ID NO: 25612 - DNA, 20 bp, synthetic construct
  source 1..20: mol_type = other DNA; note = Description of Artificial Sequence: Synthetic oligonucleotide
aaagcagaagattcaaagaa

SEQ ID NO: 25613 - DNA, 20 bp, synthetic construct
  source 1..20: mol_type = other DNA; note = Description of Artificial Sequence: Synthetic oligonucleotide
taaagcagaagattcaaaga

SEQ ID NO: 25614 - DNA, 20 bp, synthetic construct
  source 1..20: mol_type = other DNA; note = Description of Artificial Sequence: Synthetic oligonucleotide
ataaagcagaagattcaaag

SEQ ID NO: 25615 - DNA, 20 bp, synthetic construct
  source 1..20: mol_type = other DNA; note = Description of Artificial Sequence: Synthetic oligonucleotide
gataaagcagaagattcaaa

SEQ ID NO: 25616 - DNA, 20 bp, synthetic construct
  source 1..20: mol_type = other DNA; note = Description of Artificial Sequence: Synthetic oligonucleotide
agataaagcagaagattcaa

SEQ ID NO: 25617 - DNA, 20 bp, synthetic construct
  source 1..20: mol_type = other DNA; note = Description of Artificial Sequence: Synthetic oligonucleotide
aagataaagcagaagattca

SEQ ID NO: 25618 - DNA, 20 bp, synthetic construct
  source 1..20: mol_type = other DNA; note = Description of Artificial Sequence: Synthetic oligonucleotide
aaagataaagcagaagattc

SEQ ID NO: 25619 - DNA, 20 bp, synthetic construct
  source 1..20: mol_type = other DNA; note = Description of Artificial Sequence: Synthetic oligonucleotide
taaagataaagcagaagatt

SEQ ID NO: 25620 - DNA, 20 bp, synthetic construct
  source 1..20: mol_type = other DNA; note = Description of Artificial Sequence: Synthetic oligonucleotide
ttaaagataaagcagaagat

SEQ ID NO: 25621 - DNA, 20 bp, synthetic construct
  source 1..20: mol_type = other DNA; note = Description of Artificial Sequence: Synthetic oligonucleotide
tttaaagataaagcagaaga

SEQ ID NO: 25622 - DNA, 20 bp, synthetic construct
  source 1..20: mol_type = other DNA; note = Description of Artificial Sequence: Synthetic oligonucleotide
ttttaaagataaagcagaag

SEQ ID NO: 25623 - DNA, 20 bp, synthetic construct
  source 1..20: mol_type = other DNA; note = Description of Artificial Sequence: Synthetic oligonucleotide
tttttaaagataaagcagaa

SEQ ID NO: 25624 - DNA, 20 bp, synthetic construct
  source 1..20: mol_type = other DNA; note = Description of Artificial Sequence: Synthetic oligonucleotide
atttttaaagataaagcaga

SEQ ID NO: 25625 - DNA, 20 bp, synthetic construct
  source 1..20: mol_type = other DNA; note = Description of Artificial Sequence: Synthetic oligonucleotide
aatttttaaagataaagcag

SEQ ID NO: 25626 - DNA, 20 bp, synthetic construct
  source 1..20: mol_type = other DNA; note = Description of Artificial Sequence: Synthetic oligonucleotide
aaatttttaaagataaagca

SEQ ID NO: 25627 - DNA, 20 bp, synthetic construct
  source 1..20: mol_type = other DNA; note = Description of Artificial Sequence: Synthetic oligonucleotide
caaatttttaaagataaagc

SEQ ID NO: 25628 - DNA, 20 bp, synthetic construct
  source 1..20: mol_type = other DNA; note = Description of Artificial Sequence: Synthetic oligonucleotide
acaaatttttaaagataaag

SEQ ID NO: 25629 - DNA, 20 bp, synthetic construct
  source 1..20: mol_type = other DNA; note = Description of Artificial Sequence: Synthetic oligonucleotide
tacaaatttttaaagataaa

SEQ ID NO: 25630 - DNA, 20 bp, synthetic construct
  source 1..20: mol_type = other DNA; note = Description of Artificial Sequence: Synthetic oligonucleotide
atacaaatttttaaagataa

SEQ ID NO: 25631 - DNA, 20 bp, synthetic construct
  source 1..20: mol_type = other DNA; note = Description of Artificial Sequence: Synthetic oligonucleotide
tatacaaatttttaaagata

SEQ ID NO: 25632 - DNA, 20 bp, synthetic construct
  source 1..20: mol_type = other DNA; note = Description of Artificial Sequence: Synthetic oligonucleotide
ttatacaaatttttaaagat

SEQ ID NO: 25633 - DNA, 20 bp, synthetic construct
  source 1..20: mol_type = other DNA; note = Description of Artificial Sequence: Synthetic oligonucleotide
attatacaaatttttaaaga

SEQ ID NO: 25634 - DNA, 20 bp, synthetic construct
  source 1..20: mol_type = other DNA; note = Description of Artificial Sequence: Synthetic oligonucleotide
aattatacaaatttttaaag

SEQ ID NO: 25635 - DNA, 20 bp, synthetic construct
  source 1..20: mol_type = other DNA; note = Description of Artificial Sequence: Synthetic oligonucleotide
aaattatacaaatttttaaa

SEQ ID NO: 25636 - DNA, 20 bp, synthetic construct
  source 1..20: mol_type = other DNA; note = Description of Artificial Sequence: Synthetic oligonucleotide
taaattatacaaatttttaa

SEQ ID NO: 25637 - DNA, 20 bp, synthetic construct
  source 1..20: mol_type = other DNA; note = Description of Artificial Sequence: Synthetic oligonucleotide
ataaattatacaaattttta

SEQ ID NO: 25638 - DNA, 20 bp, synthetic construct
  source 1..20: mol_type = other DNA; note = Description of Artificial Sequence: Synthetic oligonucleotide
tataaattatacaaattttt

SEQ ID NO: 25639 - DNA, 20 bp, synthetic construct
  source 1..20: mol_type = other DNA; note = Description of Artificial Sequence: Synthetic oligonucleotide
atataaattatacaaatttt

SEQ ID NO: 25640 - DNA, 20 bp, synthetic construct
  source 1..20: mol_type = other DNA; note = Description of Artificial Sequence: Synthetic oligonucleotide
tatataaattatacaaattt

SEQ ID NO: 25641 - DNA, 20 bp, synthetic construct
  source 1..20: mol_type = other DNA; note = Description of Artificial Sequence: Synthetic oligonucleotide
atatataaattatacaaatt

SEQ ID NO: 25642 - DNA, 20 bp, synthetic construct
  source 1..20: mol_type = other DNA; note = Description of Artificial Sequence: Synthetic oligonucleotide
aatatataaattatacaaat

SEQ ID NO: 25643 - DNA, 20 bp, synthetic construct
  source 1..20: mol_type = other DNA; note = Description of Artificial Sequence: Synthetic oligonucleotide
aaatatataaattatacaaa

SEQ ID NO: 25644 - DNA, 20 bp, synthetic construct
  source 1..20: mol_type = other DNA; note = Description of Artificial Sequence: Synthetic oligonucleotide
aaaatatataaattatacaa

SEQ ID NO: 25645 - DNA, 20 bp, synthetic construct
  source 1..20: mol_type = other DNA; note = Description of Artificial Sequence: Synthetic oligonucleotide
taaaatatataaattataca

SEQ ID NO: 25646 - DNA, 20 bp, synthetic construct
  source 1..20: mol_type = other DNA; note = Description of Artificial Sequence: Synthetic oligonucleotide
ataaaatatataaattatac

SEQ ID NO: 25647 - DNA, 20 bp, synthetic construct
  source 1..20: mol_type = other DNA; note = Description of Artificial Sequence: Synthetic oligonucleotide
aataaaatatataaattata

SEQ ID NO: 25648 - DNA, 20 bp, synthetic construct
  source 1..20: mol_type = other DNA; note = Description of Artificial Sequence: Synthetic oligonucleotide
gaataaaatatataaattat

SEQ ID NO: 25649 - DNA, 20 bp, synthetic construct
  source 1..20: mol_type = other DNA; note = Description of Artificial Sequence: Synthetic oligonucleotide
agaataaaatatataaatta

SEQ ID NO: 25650 - DNA, 20 bp, synthetic construct
  source 1..20: mol_type = other DNA; note = Description of Artificial Sequence: Synthetic oligonucleotide
tagaataaaatatataaatt

SEQ ID NO: 25651 - DNA, 20 bp, synthetic construct
  source 1..20: mol_type = other DNA; note = Description of Artificial Sequence: Synthetic oligonucleotide
atagaataaaatatataaat

SEQ ID NO: 25652 - DNA, 20 bp, synthetic construct
  source 1..20: mol_type = other DNA; note = Description of Artificial Sequence: Synthetic oligonucleotide
catagaataaaatatataaa

SEQ ID NO: 25653 - DNA, 20 bp, synthetic construct
  source 1..20: mol_type = other DNA; note = Description of Artificial Sequence: Synthetic oligonucleotide
acatagaataaaatatataa

SEQ ID NO: 25654 - DNA, 20 bp, synthetic construct
  source 1..20: mol_type = other DNA; note = Description of Artificial Sequence: Synthetic oligonucleotide
cacatagaataaaatatata

SEQ ID NO: 25655 - DNA, 20 bp, synthetic construct
  source 1..20: mol_type = other DNA; note = Description of Artificial Sequence: Synthetic oligonucleotide
acacatagaataaaatatat

SEQ ID NO: 25656 - DNA, 20 bp, synthetic construct
  source 1..20: mol_type = other DNA; note = Description of Artificial Sequence: Synthetic oligonucleotide
aacacatagaataaaatata

SEQ ID NO: 25657 - DNA, 20 bp, synthetic construct
  source 1..20: mol_type = other DNA; note = Description of Artificial Sequence: Synthetic oligonucleotide
gaacacatagaataaaatat

SEQ ID NO: 25658 - DNA, 20 bp, synthetic construct
  source 1..20: mol_type = other DNA; note = Description of Artificial Sequence: Synthetic oligonucleotide
ggaacacatagaataaaata

SEQ ID NO: 25659 - DNA, 20 bp, synthetic construct
  source 1..20: mol_type = other DNA; note = Description of Artificial Sequence: Synthetic oligonucleotide
tggaacacatagaataaaat

SEQ ID NO: 25660 - DNA, 20 bp, synthetic construct
  source 1..20: mol_type = other DNA; note = Description of Artificial Sequence: Synthetic oligonucleotide
atggaacacatagaataaaa

SEQ ID NO: 25661 - DNA, 20 bp, synthetic construct
  source 1..20: mol_type = other DNA; note = Description of Artificial Sequence: Synthetic oligonucleotide
tatggaacacatagaataaa

SEQ ID NO: 25662 - DNA, 20 bp, synthetic construct
  source 1..20: mol_type = other DNA; note = Description of Artificial Sequence: Synthetic oligonucleotide
ctatggaacacatagaataa

SEQ ID NO: 25663 - DNA, 20 bp, synthetic construct
  source 1..20: mol_type = other DNA; note = Description of Artificial Sequence: Synthetic oligonucleotide
tctatggaacacatagaata

SEQ ID NO: 25664 - DNA, 20 bp, synthetic construct
  source 1..20: mol_type = other DNA; note = Description of Artificial Sequence: Synthetic oligonucleotide
atctatggaacacatagaat

SEQ ID NO: 25665 - DNA, 20 bp, synthetic construct
  source 1..20: mol_type = other DNA; note = Description of Artificial Sequence: Synthetic oligonucleotide
tatctatggaacacatagaa

SEQ ID NO: 25666 - DNA, 20 bp, synthetic construct
  source 1..20: mol_type = other DNA; note = Description of Artificial Sequence: Synthetic oligonucleotide
atatctatggaacacataga

SEQ ID NO: 25667 - DNA, 20 bp, synthetic construct
  source 1..20: mol_type = other DNA; note = Description of Artificial Sequence: Synthetic oligonucleotide
gatatctatggaacacatag

SEQ ID NO: 25668 - DNA, 20 bp, synthetic construct
  source 1..20: mol_type = other DNA; note = Description of Artificial Sequence: Synthetic oligonucleotide
agatatctatggaacacata

SEQ ID NO: 25669 - DNA, 20 bp, synthetic construct
  source 1..20: mol_type = other DNA; note = Description of Artificial Sequence: Synthetic oligonucleotide
aagatatctatggaacacat

SEQ ID NO: 25670 - DNA, 20 bp, synthetic construct
  source 1..20: mol_type = other DNA; note = Description of Artificial Sequence: Synthetic oligonucleotide
taagatatctatggaacaca

SEQ ID NO: 25671 - DNA, 20 bp, synthetic construct
  source 1..20: mol_type = other DNA; note = Description of Artificial Sequence: Synthetic oligonucleotide
ttaagatatctatggaacac

SEQ ID NO: 25672 - DNA, 20 bp, synthetic construct
  source 1..20: mol_type = other DNA; note = Description of Artificial Sequence: Synthetic oligonucleotide
attaagatatctatggaaca

SEQ ID NO: 25673 - DNA, 20 bp, synthetic construct
  source 1..20: mol_type = other DNA; note = Description of Artificial Sequence: Synthetic oligonucleotide
cattaagatatctatggaac

SEQ ID NO: 25674 - DNA, 20 bp, synthetic construct
  source 1..20: mol_type = other DNA; note = Description of Artificial Sequence: Synthetic oligonucleotide
acattaagatatctatggaa

SEQ ID NO: 25675 - DNA, 20 bp, synthetic construct
  source 1..20: mol_type = other DNA; note = Description of Artificial Sequence: Synthetic oligonucleotide
tacattaagatatctatgga

SEQ ID NO: 25676 - DNA, 20 bp, synthetic construct
  source 1..20: mol_type = other DNA; note = Description of Artificial Sequence: Synthetic oligonucleotide
ttacattaagatatctatgg

SEQ ID NO: 25677 - DNA, 20 bp, synthetic construct
  source 1..20: mol_type = other DNA; note = Description of Artificial Sequence: Synthetic oligonucleotide
tttacattaagatatctatg

SEQ ID NO: 25678 - DNA, 20 bp, synthetic construct
  source 1..20: mol_type = other DNA; note = Description of Artificial Sequence: Synthetic oligonucleotide
ttttacattaagatatctat

SEQ ID NO: 25679 - DNA, 20 bp, synthetic construct
  source 1..20: mol_type = other DNA; note = Description of Artificial Sequence: Synthetic oligonucleotide
attttacattaagatatcta

SEQ ID NO: 25680 - DNA, 20 bp, synthetic construct
  source 1..20: mol_type = other DNA; note = Description of Artificial Sequence: Synthetic oligonucleotide
aattttacattaagatatct

SEQ ID NO: 25681 - DNA, 20 bp, synthetic construct
  source 1..20: mol_type = other DNA; note = Description of Artificial Sequence: Synthetic oligonucleotide
taattttacattaagatatc

SEQ ID NO: 25682 - DNA, 20 bp, synthetic construct
  source 1..20: mol_type = other DNA; note = Description of Artificial Sequence: Synthetic oligonucleotide
ctaattttacattaagatat

SEQ ID NO: 25683 - DNA, 20 bp, synthetic construct
  source 1..20: mol_type = other DNA; note = Description of Artificial Sequence: Synthetic oligonucleotide
actaattttacattaagata

SEQ ID NO: 25684 - DNA, 20 bp, synthetic construct
  source 1..20: mol_type = other DNA; note = Description of Artificial Sequence: Synthetic oligonucleotide
gactaattttacattaagat

SEQ ID NO: 25685 - DNA, 20 bp, synthetic construct
  source 1..20: mol_type = other DNA; note = Description of Artificial Sequence: Synthetic oligonucleotide
tgactaattttacattaaga

SEQ ID NO: 25686 - DNA, 20 bp, synthetic construct
  source 1..20: mol_type = other DNA; note = Description of Artificial Sequence: Synthetic oligonucleotide
atgactaattttacattaag

SEQ ID NO: 25687 - DNA, 20 bp, synthetic construct
  source 1..20: mol_type = other DNA; note = Description of Artificial Sequence: Synthetic oligonucleotide
aatgactaattttacattaa

SEQ ID NO: 25688 - DNA, 20 bp, synthetic construct
  source 1..20: mol_type = other DNA; note = Description of Artificial Sequence: Synthetic oligonucleotide
aaatgactaattttacatta

SEQ ID NO: 25689 - DNA, 20 bp, synthetic construct
  source 1..20: mol_type = other DNA; note = Description of Artificial Sequence: Synthetic oligonucleotide
taaatgactaattttacatt

SEQ ID NO: 25690 - DNA, 20 bp, synthetic construct
  source 1..20: mol_type = other DNA; note = Description of Artificial Sequence: Synthetic oligonucleotide
ttaaatgactaattttacat

SEQ ID NO: 25691 - DNA, 20 bp, synthetic construct
  source 1..20: mol_type = other DNA; note = Description of Artificial Sequence: Synthetic oligonucleotide
tttaaatgactaattttaca

SEQ ID NO: 25692 - DNA, 20 bp, synthetic construct
  source 1..20: mol_type = other DNA; note = Description of Artificial Sequence: Synthetic oligonucleotide
atttaaatgactaattttac

SEQ ID NO: 25693 - DNA, 20 bp, synthetic construct
  source 1..20: mol_type = other DNA; note = Description of Artificial Sequence: Synthetic oligonucleotide
aatttaaatgactaatttta

SEQ ID NO: 25694 - DNA, 20 bp, synthetic construct
  source 1..20: mol_type = other DNA; note = Description of Artificial Sequence: Synthetic oligonucleotide
taatttaaatgactaatttt

SEQ ID NO: 25695 - DNA, 20 bp, synthetic construct
  source 1..20: mol_type = other DNA; note = Description of Artificial Sequence: Synthetic oligonucleotide
gtaatttaaatgactaattt

SEQ ID NO: 25696 - DNA, 20 bp, synthetic construct
  source 1..20: mol_type = other DNA; note = Description of Artificial Sequence: Synthetic oligonucleotide
tgtaatttaaatgactaatt

SEQ ID NO: 25697 - DNA, 20 bp, synthetic construct
  source 1..20: mol_type = other DNA; note = Description of Artificial Sequence: Synthetic oligonucleotide
gtgtaatttaaatgactaat

SEQ ID NO: 25698 - DNA, 20 bp, synthetic construct
  source 1..20: mol_type = other DNA; note = Description of Artificial Sequence: Synthetic oligonucleotide
agtgtaatttaaatgactaa

SEQ ID NO: 25699 - DNA, 20 bp, synthetic construct
  source 1..20: mol_type = other DNA; note = Description of Artificial Sequence: Synthetic oligonucleotide
cagtgtaatttaaatgacta

SEQ ID NO: 25700 - DNA, 20 bp, synthetic construct
  source 1..20: mol_type = other DNA; note = Description of Artificial Sequence: Synthetic oligonucleotide
acagtgtaatttaaatgact

SEQ ID NO: 25701 - DNA, 20 bp, synthetic construct
  source 1..20: mol_type = other DNA; note = Description of Artificial Sequence: Synthetic oligonucleotide
gacagtgtaatttaaatgac

SEQ ID NO: 25702 - DNA, 20 bp, synthetic construct
  source 1..20: mol_type = other DNA; note = Description of Artificial Sequence: Synthetic oligonucleotide
tgacagtgtaatttaaatga

SEQ ID NO: 25703 - DNA, 20 bp, synthetic construct
  source 1..20: mol_type = other DNA; note = Description of Artificial Sequence: Synthetic oligonucleotide
ttgacagtgtaatttaaatg

SEQ ID NO: 25704 - DNA, 20 bp, synthetic construct
  source 1..20: mol_type = other DNA; note = Description of Artificial Sequence: Synthetic oligonucleotide
attgacagtgtaatttaaat

SEQ ID NO: 25705 - DNA, 20 bp, synthetic construct
  source 1..20: mol_type = other DNA; note = Description of Artificial Sequence: Synthetic oligonucleotide
aattgacagtgtaatttaaa

SEQ ID NO: 25706 - DNA, 20 bp, synthetic construct
  source 1..20: mol_type = other DNA; note = Description of Artificial Sequence: Synthetic oligonucleotide
taattgacagtgtaatttaa

SEQ ID NO: 25707 - DNA, 20 bp, synthetic construct
  source 1..20: mol_type = other DNA; note = Description of Artificial Sequence: Synthetic oligonucleotide
ttaattgacagtgtaattta

SEQ ID NO: 25708 - DNA, 20 bp, synthetic construct
  source 1..20: mol_type = other DNA; note = Description of Artificial Sequence: Synthetic oligonucleotide
tttaattgacagtgtaattt

SEQ ID NO: 25709 - DNA, 20 bp, synthetic construct
  source 1..20: mol_type = other DNA; note = Description of Artificial Sequence: Synthetic oligonucleotide
ttttaattgacagtgtaatt

SEQ ID NO: 25710 - DNA, 20 bp, synthetic construct
  source 1..20: mol_type = other DNA; note = Description of Artificial Sequence: Synthetic oligonucleotide
cttttaattgacagtgtaat

SEQ ID NO: 25711 - DNA, 20 bp, synthetic construct
  source 1..20: mol_type = other DNA; note = Description of Artificial Sequence: Synthetic oligonucleotide
acttttaattgacagtgtaa

SEQ ID NO: 25712 - DNA, 20 bp, synthetic construct
  source 1..20: mol_type = other DNA; note = Description of Artificial Sequence: Synthetic oligonucleotide
tacttttaattgacagtgta

SEQ ID NO: 25713 - DNA, 20 bp, synthetic construct
  source 1..20: mol_type = other DNA; note = Description of Artificial Sequence: Synthetic oligonucleotide
ttacttttaattgacagtgt

SEQ ID NO: 25714 - DNA, 20 bp, synthetic construct
  source 1..20: mol_type = other DNA; note = Description of Artificial Sequence: Synthetic oligonucleotide
attacttttaattgacagtg

SEQ ID NO: 25715 - DNA, 20 bp, synthetic construct
  source 1..20: mol_type = other DNA; note = Description of Artificial Sequence: Synthetic oligonucleotide
cattacttttaattgacagt

SEQ ID NO: 25716 - DNA, 20 bp, synthetic construct
  source 1..20: mol_type = other DNA; note = Description of Artificial Sequence: Synthetic oligonucleotide
ccattacttttaattgacag

SEQ ID NO: 25717 - DNA, 20 bp, synthetic construct
  source 1..20: mol_type = other DNA; note = Description of Artificial Sequence: Synthetic oligonucleotide
cccattacttttaattgaca

SEQ ID NO: 25718 - DNA, 20 bp, synthetic construct
  source 1..20: mol_type = other DNA; note = Description of Artificial Sequence: Synthetic oligonucleotide
gcccattacttttaattgac

SEQ ID NO: 25719 - DNA, 20 bp, synthetic construct
  source 1..20: mol_type = other DNA; note = Description of Artificial Sequence: Synthetic oligonucleotide
tgcccattacttttaattga

SEQ ID NO: 25720 - DNA, 20 bp, synthetic construct
  source 1..20: mol_type = other DNA; note = Description of Artificial Sequence: Synthetic oligonucleotide
ttgcccattacttttaattg

SEQ ID NO: 25721 - DNA, 20 bp, synthetic construct
  source 1..20: mol_type = other DNA; note = Description of Artificial Sequence: Synthetic oligonucleotide
cttgcccattacttttaatt

SEQ ID NO: 25722 - DNA, 20 bp, synthetic construct
  source 1..20: mol_type = other DNA; note = Description of Artificial Sequence: Synthetic oligonucleotide
tcttgcccattacttttaat

SEQ ID NO: 25723 - DNA, 20 bp, synthetic construct
  source 1..20: mol_type = other DNA; note = Description of Artificial Sequence: Synthetic oligonucleotide
ctcttgcccattacttttaa

SEQ ID NO: 25724 - DNA, 20 bp, synthetic construct
  source 1..20: mol_type = other DNA; note = Description of Artificial Sequence: Synthetic oligonucleotide
tctcttgcccattactttta

SEQ ID NO: 25725 - DNA, 20 bp, synthetic construct
  source 1..20: mol_type = other DNA; note = Description of Artificial Sequence: Synthetic oligonucleotide
atctcttgcccattactttt

SEQ ID NO: 25726 - DNA, 20 bp, synthetic construct
  source 1..20: mol_type = other DNA; note = Description of Artificial Sequence: Synthetic oligonucleotide
aatctcttgcccattacttt

SEQ ID NO: 25727 - DNA, 20 bp, synthetic construct
  source 1..20: mol_type = other DNA; note = Description of Artificial Sequence: Synthetic oligonucleotide
caatctcttgcccattactt

SEQ ID NO: 25728 - DNA, 20 bp, synthetic construct
  source 1..20: mol_type = other DNA; note = Description of Artificial Sequence: Synthetic oligonucleotide
gcaatctcttgcccattact

SEQ ID NO: 25729 - DNA, 20 bp, synthetic construct
  source 1..20: mol_type = other DNA; note = Description of Artificial Sequence: Synthetic oligonucleotide
tgcaatctcttgcccattac

SEQ ID NO: 25730 - DNA, 20 bp, synthetic construct
  source 1..20: mol_type = other DNA; note = Description of Artificial Sequence: Synthetic oligonucleotide
atgcaatctcttgcccatta

SEQ ID NO: 25731 - DNA, 20 bp, synthetic construct
  source 1..20: mol_type = other DNA; note = Description of Artificial Sequence: Synthetic oligonucleotide
gatgcaatctcttgcccatt

SEQ ID NO: 25732 - DNA, 20 bp, synthetic construct
  source 1..20: mol_type = other DNA; note = Description of Artificial Sequence: Synthetic oligonucleotide
tgatgcaatctcttgcccat

SEQ ID NO: 25733 - DNA, 20 bp, synthetic construct
  source 1..20: mol_type = other DNA; note = Description of Artificial Sequence: Synthetic oligonucleotide
atgatgcaatctcttgccca

SEQ ID NO: 25734 - DNA, 20 bp, synthetic construct
  source 1..20: mol_type = other DNA; note = Description of Artificial Sequence: Synthetic oligonucleotide
tatgatgcaatctcttgccc

SEQ ID NO: 25735 - DNA, 20 bp, synthetic construct
  source 1..20: mol_type = other DNA; note = Description of Artificial Sequence: Synthetic oligonucleotide
gtatgatgcaatctcttgcc

SEQ ID NO: 25736 - DNA, 20 bp, synthetic construct
  source 1..20: mol_type = other DNA; note = Description of Artificial Sequence: Synthetic oligonucleotide
agtatgatgcaatctcttgc

SEQ ID NO: 25737 - DNA, 20 bp, synthetic construct
  source 1..20: mol_type = other DNA; note = Description of Artificial Sequence: Synthetic oligonucleotide
tagtatgatgcaatctcttg

SEQ ID NO: 25738 - DNA, 20 bp, synthetic construct
  source 1..20: mol_type = other DNA; note = Description of Artificial Sequence: Synthetic oligonucleotide
ttagtatgatgcaatctctt

SEQ ID NO: 25739 - DNA, 20 bp, synthetic construct
  source 1..20: mol_type = other DNA; note = Description of Artificial Sequence: Synthetic oligonucleotide
attagtatgatgcaatctct

SEQ ID NO: 25740 - DNA, 20 bp, synthetic construct
  source 1..20: mol_type = other DNA; note = Description of Artificial Sequence: Synthetic oligonucleotide
aattagtatgatgcaatctc

SEQ ID NO: 25741 - DNA, 20 bp, synthetic construct
  source 1..20: mol_type = other DNA; note = Description of Artificial Sequence: Synthetic oligonucleotide
aaattagtatgatgcaatct

SEQ ID NO: 25742 - DNA, 20 bp, synthetic construct
  source 1..20: mol_type = other DNA; note = Description of Artificial Sequence: Synthetic oligonucleotide
taaattagtatgatgcaatc

SEQ ID NO: 25743 - DNA, 20 bp, synthetic construct
  source 1..20: mol_type = other DNA; note = Description of Artificial Sequence: Synthetic oligonucleotide
ctaaattagtatgatgcaat

SEQ ID NO: 25744 - DNA, 20 bp, synthetic construct
  source 1..20: mol_type = other DNA; note = Description of Artificial Sequence: Synthetic oligonucleotide
actaaattagtatgatgcaa

SEQ ID NO: 25745 - DNA, 20 bp, synthetic construct
  source 1..20: mol_type = other DNA; note = Description of Artificial Sequence: Synthetic oligonucleotide
tactaaattagtatgatgca

SEQ ID NO: 25746 - DNA, 20 bp, synthetic construct
  source 1..20: mol_type = other DNA; note = Description of Artificial Sequence: Synthetic oligonucleotide
ttactaaattagtatgatgc

SEQ ID NO: 25747 - DNA, 20 bp, synthetic construct
  source 1..20: mol_type = other DNA; note = Description of Artificial Sequence: Synthetic oligonucleotide
cttactaaattagtatgatg

SEQ ID NO: 25748 - DNA, 20 bp, synthetic construct
  source 1..20: mol_type = other DNA; note = Description of Artificial Sequence: Synthetic oligonucleotide
tcttactaaattagtatgat

SEQ ID NO: 25749 - DNA, 20 bp, synthetic construct
  source 1..20: mol_type = other DNA; note = Description of Artificial Sequence: Synthetic oligonucleotide
ttcttactaaattagtatga

SEQ ID NO: 25750 - DNA, 20 bp, synthetic construct
  source 1..20: mol_type = other DNA; note = Description of Artificial Sequence: Synthetic oligonucleotide
gttcttactaaattagtatg

SEQ ID NO: 25751 - DNA, 20 bp, synthetic construct
  source 1..20: mol_type = other DNA; note = Description of Artificial Sequence: Synthetic oligonucleotide
cgttcttactaaattagtat

SEQ ID NO: 25752 - DNA, 20 bp, synthetic construct
  source 1..20: mol_type = other DNA; note = Description of Artificial Sequence: Synthetic oligonucleotide
acgttcttactaaattagta

SEQ ID NO: 25753 - DNA, 20 bp, synthetic construct
  source 1..20: mol_type = other DNA; note = Description of Artificial Sequence: Synthetic oligonucleotide
aacgttcttactaaattagt

SEQ ID NO: 25754 - DNA, 20 bp, synthetic construct
  source 1..20: mol_type = other DNA; note = Description of Artificial Sequence: Synthetic oligonucleotide
gaacgttcttactaaattag

SEQ ID NO: 25755 - DNA, 20 bp, synthetic construct
  source 1..20: mol_type = other DNA; note = Description of Artificial Sequence: Synthetic oligonucleotide
ggaacgttcttactaaatta

SEQ ID NO: 25756 - DNA, 20 bp, synthetic construct
  source 1..20: mol_type = other DNA; note = Description of Artificial Sequence: Synthetic oligonucleotide
gggaacgttcttactaaatt

SEQ ID NO: 25757 - DNA, 20 bp, synthetic construct
  source 1..20: mol_type = other DNA; note = Description of Artificial Sequence: Synthetic oligonucleotide
tgggaacgttcttactaaat

SEQ ID NO: 25758 - DNA, 20 bp, synthetic construct
  source 1..20: mol_type = other DNA; note = Description of Artificial Sequence: Synthetic oligonucleotide
ttgggaacgttcttactaaa

SEQ ID NO: 25759 - DNA, 20 bp, synthetic construct
  source 1..20: mol_type = other DNA; note = Description of Artificial Sequence: Synthetic oligonucleotide
tttgggaacgttcttactaa

SEQ ID NO: 25760 - DNA, 20 bp, synthetic construct
  source 1..20: mol_type = other DNA; note = Description of Artificial Sequence: Synthetic oligonucleotide
atttgggaacgttcttacta

SEQ ID NO: 25761 - DNA, 20 bp, synthetic construct
  source 1..20: mol_type = other DNA; note = Description of Artificial Sequence: Synthetic oligonucleotide
catttgggaacgttcttact

SEQ ID NO: 25762 - DNA, 20 bp, synthetic construct
  source 1..20: mol_type = other DNA; note = Description of Artificial Sequence: Synthetic oligonucleotide
acatttgggaacgttcttac

SEQ ID NO: 25763 - DNA, 20 bp, synthetic construct
  source 1..20: mol_type = other DNA; note = Description of Artificial Sequence: Synthetic oligonucleotide
aacatttgggaacgttctta

SEQ ID NO: 25764 - DNA, 20 bp, synthetic construct
  source 1..20: mol_type = other DNA; note = Description of Artificial Sequence: Synthetic oligonucleotide
caacatttgggaacgttctt

SEQ ID NO: 25765 - DNA, 20 bp, synthetic construct
  source 1..20: mol_type = other DNA; note = Description of Artificial Sequence: Synthetic oligonucleotide
acaacatttgggaacgttct

SEQ ID NO: 25766 - DNA, 20 bp, synthetic construct
  source 1..20: mol_type = other DNA; note = Description of Artificial Sequence: Synthetic oligonucleotide
tacaacatttgggaacgttc

SEQ ID NO: 25767 - DNA, 20 bp, synthetic construct
  source 1..20: mol_type = other DNA; note = Description of Artificial Sequence: Synthetic oligonucleotide
ttacaacatttgggaacgtt

SEQ ID NO: 25768 - DNA, 20 bp, synthetic construct
  source 1..20: mol_type = other DNA; note = Description of Artificial Sequence: Synthetic oligonucleotide
gttacaacatttgggaacgt

SEQ ID NO: 25769 - DNA, 20 bp, synthetic construct
  source 1..20: mol_type = other DNA; note = Description of Artificial Sequence: Synthetic oligonucleotide
tgttacaacatttgggaacg

SEQ ID NO: 25770 - DNA, 20 bp, synthetic construct
  source 1..20: mol_type = other DNA; note = Description of Artificial Sequence: Synthetic oligonucleotide
ttgttacaacatttgggaac

SEQ ID NO: 25771 - DNA, 20 bp, synthetic construct
  source 1..20: mol_type = other DNA; note = Description of Artificial Sequence: Synthetic oligonucleotide
attgttacaacatttgggaa

SEQ ID NO: 25772 - DNA, 20 bp, synthetic construct
  source 1..20: mol_type = other DNA; note = Description of Artificial Sequence: Synthetic oligonucleotide
cattgttacaacatttggga

SEQ ID NO: 25773 - DNA, 20 bp, synthetic construct
  source 1..20: mol_type = other DNA; note = Description of Artificial Sequence: Synthetic oligonucleotide
acattgttacaacatttggg

SEQ ID NO: 25774 - DNA, 20 bp, synthetic construct
  source 1..20: mol_type = other DNA; note = Description of Artificial Sequence: Synthetic oligonucleotide
cacattgttacaacatttgg

SEQ ID NO: 25775 - DNA, 20 bp, synthetic construct
  source 1..20: mol_type = other DNA; note = Description of Artificial Sequence: Synthetic oligonucleotide
ccacattgttacaacatttg

SEQ ID NO: 25776 - DNA, 20 bp, synthetic construct
  source 1..20: mol_type = other DNA; note = Description of Artificial Sequence: Synthetic oligonucleotide
tccacattgttacaacattt

SEQ ID NO: 25777 - DNA, 20 bp, synthetic construct
  source 1..20: mol_type = other DNA; note = Description of Artificial Sequence: Synthetic oligonucleotide
atccacattgttacaacatt

SEQ ID NO: 25778 - DNA, 20 bp, synthetic construct
  source 1..20: mol_type = other DNA; note = Description of Artificial Sequence: Synthetic oligonucleotide
gatccacattgttacaacat

SEQ ID NO: 25779 - DNA, 20 bp, synthetic construct
  source 1..20: mol_type = other DNA; note = Description of Artificial Sequence: Synthetic oligonucleotide
tgatccacattgttacaaca

SEQ ID NO: 25780 - DNA, 20 bp, synthetic construct
  source 1..20: mol_type = other DNA; note = Description of Artificial Sequence: Synthetic oligonucleotide
atgatccacattgttacaac

SEQ ID NO: 25781 - DNA, 20 bp, synthetic construct
  source 1..20: mol_type = other DNA; note = Description of Artificial Sequence: Synthetic oligonucleotide
tatgatccacattgttacaa

SEQ ID NO: 25782 - DNA, 20 bp, synthetic construct
  source 1..20: mol_type = other DNA; note = Description of Artificial Sequence: Synthetic oligonucleotide
gtatgatccacattgttaca

SEQ ID NO: 25783 - DNA, 20 bp, synthetic construct
  source 1..20: mol_type = other DNA; note = Description of Artificial Sequence: Synthetic oligonucleotide
tgtatgatccacattgttac

SEQ ID NO: 25784 - DNA, 20 bp, synthetic construct
  source 1..20: mol_type = other DNA; note = Description of Artificial Sequence: Synthetic oligonucleotide
atgtatgatccacattgtta

SEQ ID NO: 25785 - DNA, 20 bp, synthetic construct
  source 1..20: mol_type = other DNA; note = Description of Artificial Sequence: Synthetic oligonucleotide
gatgtatgatccacattgtt

SEQ ID NO: 25786 - DNA, 20 bp, synthetic construct
  source 1..20: mol_type = other DNA; note = Description of Artificial Sequence: Synthetic oligonucleotide
agatgtatgatccacattgt

SEQ ID NO: 25787 - DNA, 20 bp, synthetic construct
  source 1..20: mol_type = other DNA; note = Description of Artificial Sequence: Synthetic oligonucleotide
gagatgtatgatccacattg

SEQ ID NO: 25788 - DNA, 20 bp, synthetic construct
  source 1..20: mol_type = other DNA; note = Description of Artificial Sequence: Synthetic oligonucleotide
agagatgtatgatccacatt

SEQ ID NO: 25789 - DNA, 20 bp, synthetic construct
  source 1..20: mol_type = other DNA; note = Description of Artificial Sequence: Synthetic oligonucleotide
cagagatgtatgatccacat

SEQ ID NO: 25790 - DNA, 20 bp, synthetic construct
  source 1..20: mol_type = other DNA; note = Description of Artificial Sequence: Synthetic oligonucleotide
ccagagatgtatgatccaca

SEQ ID NO: 25791 - DNA, 20 bp, synthetic construct
  source 1..20: mol_type = other DNA; note = Description of Artificial Sequence: Synthetic oligonucleotide
accagagatgtatgatccac

SEQ ID NO: 25792 - DNA, 20 bp, synthetic construct
  source 1..20: mol_type = other DNA; note = Description of Artificial Sequence: Synthetic oligonucleotide
aaccagagatgtatgatcca

SEQ ID NO: 25793 - DNA, 20 bp, synthetic construct
  source 1..20: mol_type = other DNA; note = Description of Artificial Sequence: Synthetic oligonucleotide
aaaccagagatgtatgatcc

SEQ ID NO: 25794 - DNA, 20 bp, synthetic construct
  source 1..20: mol_type = other DNA; note = Description of Artificial Sequence: Synthetic oligonucleotide
aaaaccagagatgtatgatc

SEQ ID NO: 25795 - DNA, 20 bp, synthetic construct
  source 1..20: mol_type = other DNA; note = Description of Artificial Sequence: Synthetic oligonucleotide
aaaaaccagagatgtatgat

SEQ ID NO: 25796 - DNA, 20 bp, synthetic construct
  source 1..20: mol_type = other DNA; note = Description of Artificial Sequence: Synthetic oligonucleotide
aaaaaaccagagatgtatga

SEQ ID NO: 25797 - DNA, 20 bp, synthetic construct
  source 1..20: mol_type = other DNA; note = Description of Artificial Sequence: Synthetic oligonucleotide
taaaaaaccagagatgtatg

SEQ ID NO: 25798 - DNA, 20 bp, synthetic construct
  source 1..20: mol_type = other DNA; note = Description of Artificial Sequence: Synthetic oligonucleotide
ttaaaaaaccagagatgtat

SEQ ID NO: 25799 - DNA, 20 bp, synthetic construct
  source 1..20: mol_type = other DNA; note = Description of Artificial Sequence: Synthetic oligonucleotide
tttaaaaaaccagagatgta

SEQ ID NO: 25800 - DNA, 20 bp, synthetic construct
  source 1..20: mol_type = other DNA; note = Description of Artificial Sequence: Synthetic oligonucleotide
atttaaaaaaccagagatgt

SEQ ID NO: 25801 - DNA, 20 bp, synthetic construct
  source 1..20: mol_type = other DNA; note = Description of Artificial Sequence: Synthetic oligonucleotide
catttaaaaaaccagagatg

SEQ ID NO: 25802 - DNA, 20 bp, synthetic construct
  source 1..20: mol_type = other DNA; note = Description of Artificial Sequence: Synthetic oligonucleotide
acatttaaaaaaccagagat

SEQ ID NO: 25803 - DNA, 20 bp, synthetic construct
  source 1..20: mol_type = other DNA; note = Description of Artificial Sequence: Synthetic oligonucleotide
tacatttaaaaaaccagaga

SEQ ID NO: 25804 - DNA, 20 bp, synthetic construct
  source 1..20: mol_type = other DNA; note = Description of Artificial Sequence: Synthetic oligonucleotide
atacatttaaaaaaccagag

SEQ ID NO: 25805 - DNA, 20 bp, synthetic construct
  source 1..20: mol_type = other DNA; note = Description of Artificial Sequence: Synthetic oligonucleotide
aatacatttaaaaaaccaga

SEQ ID NO: 25806 - DNA, 20 bp, synthetic construct
  source 1..20: mol_type = other DNA; note = Description of Artificial Sequence: Synthetic oligonucleotide
caatacatttaaaaaaccag

SEQ ID NO: 25807 - DNA, 20 bp, synthetic construct
  source 1..20: mol_type = other DNA; note = Description of Artificial Sequence: Synthetic oligonucleotide
tcaatacatttaaaaaacca

SEQ ID NO: 25808 - DNA, 20 bp, synthetic construct
  source 1..20: mol_type = other DNA; note = Description of Artificial Sequence: Synthetic oligonucleotide
ctcaatacatttaaaaaacc

SEQ ID NO: 25809 - DNA, 20 bp, synthetic construct
  source 1..20: mol_type = other DNA; note = Description of Artificial Sequence: Synthetic oligonucleotide
cctcaatacatttaaaaaac

SEQ ID NO: 25810 - DNA, 20 bp, synthetic construct
  source 1..20: mol_type = other DNA; note = Description of Artificial Sequence: Synthetic oligonucleotide
gcctcaatacatttaaaaaa

SEQ ID NO: 25811 - DNA, 20 bp, synthetic construct
  source 1..20: mol_type = other DNA; note = Description of Artificial Sequence: Synthetic oligonucleotide
agcctcaatacatttaaaaa

SEQ ID NO: 25812 - DNA, 20 bp, synthetic construct
  source 1..20: mol_type = other DNA; note = Description of Artificial Sequence: Synthetic oligonucleotide
aagcctcaatacatttaaaa

SEQ ID NO: 25813 - DNA, 20 bp, synthetic construct
  source 1..20: mol_type = other DNA; note = Description of Artificial Sequence: Synthetic oligonucleotide
aaagcctcaatacatttaaa

SEQ ID NO: 25814 - DNA, 20 bp, synthetic construct
  source 1..20: mol_type = other DNA; note = Description of Artificial Sequence: Synthetic oligonucleotide
gaaagcctcaatacatttaa

SEQ ID NO: 25815 - DNA, 20 bp, synthetic construct
  source 1..20: mol_type = other DNA; note = Description of Artificial Sequence: Synthetic oligonucleotide
agaaagcctcaatacattta

SEQ ID NO: 25816 - DNA, 20 bp, synthetic construct
  source 1..20: mol_type = other DNA; note = Description of Artificial Sequence: Synthetic oligonucleotide
aagaaagcctcaatacattt

SEQ ID NO: 25817 - DNA, 20 bp, synthetic construct
  source 1..20: mol_type = other DNA; note = Description of Artificial Sequence: Synthetic oligonucleotide
caagaaagcctcaatacatt

SEQ ID NO: 25818 - DNA, 20 bp, synthetic construct
  source 1..20: mol_type = other DNA; note = Description of Artificial Sequence: Synthetic oligonucleotide
ccaagaaagcctcaatacat

SEQ ID NO: 25819 - DNA, 20 bp, synthetic construct
  source 1..20: mol_type = other DNA; note = Description of Artificial Sequence: Synthetic oligonucleotide
accaagaaagcctcaataca

SEQ ID NO: 25820 - DNA, 20 bp, synthetic construct
  source 1..20: mol_type = other DNA; note = Description of Artificial Sequence: Synthetic oligonucleotide
caccaagaaagcctcaatac

SEQ ID NO: 25821 - DNA, 20 bp, synthetic construct
  source 1..20: mol_type = other DNA; note = Description of Artificial Sequence: Synthetic oligonucleotide
ccaccaagaaagcctcaata

SEQ ID NO: 25822 - DNA, 20 bp, synthetic construct
  source 1..20: mol_type = other DNA; note = Description of Artificial Sequence: Synthetic oligonucleotide
tccaccaagaaagcctcaat

SEQ ID NO: 25823 - DNA, 20 bp, synthetic construct
  source 1..20: mol_type = other DNA; note = Description of Artificial Sequence: Synthetic oligonucleotide
gtccaccaagaaagcctcaa

SEQ ID NO: 25824 - DNA, 20 bp, synthetic construct
  source 1..20: mol_type = other DNA; note = Description of Artificial Sequence: Synthetic oligonucleotide
agtccaccaagaaagcctca

SEQ ID NO: 25825 - DNA, 20 bp, synthetic construct
  source 1..20: mol_type = other DNA; note = Description of Artificial Sequence: Synthetic oligonucleotide
tagtccaccaagaaagcctc

SEQ ID NO: 25826 - DNA, 20 bp, synthetic construct
  source 1..20: mol_type = other DNA; note = Description of Artificial Sequence: Synthetic oligonucleotide
ctagtccaccaagaaagcct

SEQ ID NO: 25827 - DNA, 20 bp, synthetic construct
  source 1..20: mol_type = other DNA; note = Description of Artificial Sequence: Synthetic oligonucleotide
actagtccaccaagaaagcc

SEQ ID NO: 25828 - DNA, 20 bp, synthetic construct
  source 1..20: mol_type = other DNA; note = Description of Artificial Sequence: Synthetic oligonucleotide
tactagtccaccaagaaagc

SEQ ID NO: 25829 - DNA, 20 bp, synthetic construct
  source 1..20: mol_type = other DNA; note = Description of Artificial Sequence: Synthetic oligonucleotide
atactagtccaccaagaaag

SEQ ID NO: 25830 - DNA, 20 bp, synthetic construct
  source 1..20: mol_type = other DNA; note = Description of Artificial Sequence: Synthetic oligonucleotide
tatactagtccaccaagaaa

SEQ ID NO: 25831 - DNA, 20 bp, synthetic construct
  source 1..20: mol_type = other DNA; note = Description of Artificial Sequence: Synthetic oligonucleotide
ctatactagtccaccaagaa

SEQ ID NO: 25832 - DNA, 20 bp, synthetic construct
  source 1..20: mol_type = other DNA; note = Description of Artificial Sequence: Synthetic oligonucleotide
actatactagtccaccaaga

SEQ ID NO: 25833 - DNA, 20 bp, synthetic construct
  source 1..20: mol_type = other DNA; note = Description of Artificial Sequence: Synthetic oligonucleotide
tactatactagtccaccaag

SEQ ID NO: 25834 - DNA, 20 bp, synthetic construct
  source 1..20: mol_type = other DNA; note = Description of Artificial Sequence: Synthetic oligonucleotide
atactatactagtccaccaa

SEQ ID NO: 25835 - DNA, 20 bp, synthetic construct
  source 1..20: mol_type = other DNA; note = Description of Artificial Sequence: Synthetic oligonucleotide
tatactatactagtccacca

SEQ ID NO: 25836 - DNA, 20 bp, synthetic construct
  source 1..20: mol_type = other DNA; note = Description of Artificial Sequence: Synthetic oligonucleotide
gtatactatactagtccacc

SEQ ID NO: 25837 - DNA, 20 bp, synthetic construct
  source 1..20: mol_type = other DNA; note = Description of Artificial Sequence: Synthetic oligonucleotide
cgtatactatactagtccac

SEQ ID NO: 25838 - DNA, 20 bp, synthetic construct
  source 1..20: mol_type = other DNA; note = Description of Artificial Sequence: Synthetic oligonucleotide
ccgtatactatactagtcca

SEQ ID NO: 25839 - DNA, 20 bp, synthetic construct
  source 1..20: mol_type = other DNA; note = Description of Artificial Sequence: Synthetic oligonucleotide
accgtatactatactagtcc

SEQ ID NO: 25840 - DNA, 20 bp, synthetic construct
  source 1..20: mol_type = other DNA; note = Description of Artificial Sequence: Synthetic oligonucleotide
gaccgtatactatactagtc

SEQ ID NO: 25841 - DNA, 20 bp, synthetic construct
  source 1..20: mol_type = other DNA; note = Description of Artificial Sequence: Synthetic oligonucleotide
tgaccgtatactatactagt

SEQ ID NO: 25842 - DNA, 20 bp, synthetic construct
  source 1..20: mol_type = other DNA; note = Description of Artificial Sequence: Synthetic oligonucleotide
ctgaccgtatactatactag

SEQ ID NO: 25843 - DNA, 20 bp, synthetic construct
  source 1..20: mol_type = other DNA; note = Description of Artificial Sequence: Synthetic oligonucleotide
actgaccgtatactatacta

SEQ ID NO: 25844 - DNA, 20 bp, synthetic construct
  source 1..20: mol_type = other DNA; note = Description of Artificial Sequence: Synthetic oligonucleotide
aactgaccgtatactatact

SEQ ID NO: 25845 - DNA, 20 bp, synthetic construct
  source 1..20: mol_type = other DNA; note = Description of Artificial Sequence: Synthetic oligonucleotide
taactgaccgtatactatac

SEQ ID NO: 25846 - DNA, 20 bp, synthetic construct
  source 1..20: mol_type = other DNA; note = Description of Artificial Sequence: Synthetic oligonucleotide
ataactgaccgtatactata

SEQ ID NO: 25847 - DNA, 20 bp, synthetic construct
  source 1..20: mol_type = other DNA; note = Description of Artificial Sequence: Synthetic oligonucleotide
cataactgaccgtatactat

SEQ ID NO: 25848 - DNA, 20 bp, synthetic construct
  source 1..20: mol_type = other DNA; note = Description of Artificial Sequence: Synthetic oligonucleotide
acataactgaccgtatacta

SEQ ID NO: 25849 - DNA, 20 bp, synthetic construct
  source 1..20: mol_type = other DNA; note = Description of Artificial Sequence: Synthetic oligonucleotide
gacataactgaccgtatact

SEQ ID NO: 25850 - DNA, 20 bp, synthetic construct
  source 1..20: mol_type = other DNA; note = Description of Artificial Sequence: Synthetic oligonucleotide
tgacataactgaccgtatac

SEQ ID NO: 25851 - DNA, 20 bp, synthetic construct
  source 1..20: mol_type = other DNA; note = Description of Artificial Sequence: Synthetic oligonucleotide
ttgacataactgaccgtata

SEQ ID NO: 25852 - DNA, 20 bp, synthetic construct
  source 1..20: mol_type = other DNA; note = Description of Artificial Sequence: Synthetic oligonucleotide
attgacataactgaccgtat

SEQ ID NO: 25853 - DNA, 20 bp, synthetic construct
  source 1..20: mol_type = other DNA; note = Description of Artificial Sequence: Synthetic oligonucleotide
cattgacataactgaccgta

SEQ ID NO: 25854 - DNA, 20 bp, synthetic construct
  source 1..20: mol_type = other DNA; note = Description of Artificial Sequence: Synthetic oligonucleotide
acattgacataactgaccgt

SEQ ID NO: 25855 - DNA, 20 bp, synthetic construct
  source 1..20: mol_type = other DNA; note = Description of Artificial Sequence: Synthetic oligonucleotide
aacattgacataactgaccg

SEQ ID NO: 25856 - DNA, 20 bp, synthetic construct
  source 1..20: mol_type = other DNA; note = Description of Artificial Sequence: Synthetic oligonucleotide
aaacattgacataactgacc

SEQ ID NO: 25857 - DNA, 20 bp, synthetic construct
  source 1..20: mol_type = other DNA; note = Description of Artificial Sequence: Synthetic oligonucleotide
gaaacattgacataactgac

SEQ ID NO: 25858 - DNA, 20 bp, synthetic construct
  source 1..20: mol_type = other DNA; note = Description of Artificial Sequence: Synthetic oligonucleotide
tgaaacattgacataactga

SEQ ID NO: 25859 - DNA, 20 bp, synthetic construct
  source 1..20: mol_type = other DNA; note = Description of Artificial Sequence: Synthetic oligonucleotide
atgaaacattgacataactg

SEQ ID NO: 25860 - DNA, 20 bp, synthetic construct
  source 1..20: mol_type = other DNA; note = Description of Artificial Sequence: Synthetic oligonucleotide
catgaaacattgacataact

SEQ ID NO: 25861 - DNA, 20 bp, synthetic construct
  source 1..20: mol_type = other DNA; note = Description of Artificial Sequence: Synthetic oligonucleotide
ccatgaaacattgacataac

SEQ ID NO: 25862 - DNA, 20 bp, synthetic construct
  source 1..20: mol_type = other DNA; note = Description of Artificial Sequence: Synthetic oligonucleotide
accatgaaacattgacataa

SEQ ID NO: 25863 - DNA, 20 bp, synthetic construct
  source 1..20: mol_type = other DNA; note = Description of Artificial Sequence: Synthetic oligonucleotide
gaccatgaaacattgacata

SEQ ID NO: 25864 - DNA, 20 bp, synthetic construct
  source 1..20: mol_type = other DNA; note = Description of Artificial Sequence: Synthetic oligonucleotide
tgaccatgaaacattgacat

SEQ ID NO: 25865 - DNA, 20 bp, synthetic construct
  source 1..20: mol_type = other DNA; note = Description of Artificial Sequence: Synthetic oligonucleotide
ttgaccatgaaacattgaca

SEQ ID NO: 25866 - DNA, 20 bp, synthetic construct
  source 1..20: mol_type = other DNA; note = Description of Artificial Sequence: Synthetic oligonucleotide
attgaccatgaaacattgac

SEQ ID NO: 25867 - DNA, 20 bp, synthetic construct
  source 1..20: mol_type = other DNA; note = Description of Artificial Sequence: Synthetic oligonucleotide
tattgaccatgaaacattga

SEQ ID NO: 25868 - DNA, 20 bp, synthetic construct
  source 1..20: mol_type = other DNA; note = Description of Artificial Sequence: Synthetic oligonucleotide
ttattgaccatgaaacattg

SEQ ID NO: 25869 - DNA, 20 bp, synthetic construct
  source 1..20: mol_type = other DNA; note = Description of Artificial Sequence: Synthetic oligonucleotide
tttattgaccatgaaacatt

SEQ ID NO: 25870 - DNA, 20 bp, synthetic construct
  source 1..20: mol_type = other DNA; note = Description of Artificial Sequence: Synthetic oligonucleotide
ttttattgaccatgaaacat

SEQ ID NO: 25871 - DNA, 20 bp, synthetic construct
  source 1..20: mol_type = other DNA; note = Description of Artificial Sequence: Synthetic oligonucleotide
tttttattgaccatgaaaca

SEQ ID NO: 25872 - DNA, 20 bp, synthetic construct
  source 1..20: mol_type = other DNA; note = Description of Artificial Sequence: Synthetic oligonucleotide
ctttttattgaccatgaaac

SEQ ID NO: 25873 - DNA, 20 bp, synthetic construct
  source 1..20: mol_type = other DNA; note = Description of Artificial Sequence: Synthetic oligonucleotide
cctttttattgaccatgaaa

SEQ ID NO: 25874 - DNA, 20 bp, synthetic construct
  source 1..20: mol_type = other DNA; note = Description of Artificial Sequence: Synthetic oligonucleotide
tcctttttattgaccatgaa

SEQ ID NO: 25875 - DNA, 20 bp, synthetic construct
  source 1..20: mol_type = other DNA; note = Description of Artificial Sequence: Synthetic oligonucleotide
ttcctttttattgaccatga

SEQ ID NO: 25876 - DNA, 20 bp, synthetic construct
  source 1..20: mol_type = other DNA; note = Description of Artificial Sequence: Synthetic oligonucleotide
cttcctttttattgaccatg

SEQ ID NO: 25877 - DNA, 20 bp, synthetic construct
  source 1..20: mol_type = other DNA; note = Description of Artificial Sequence: Synthetic oligonucleotide
acttcctttttattgaccat

SEQ ID NO: 25878 - DNA, 20 bp, synthetic construct
  source 1..20: mol_type = other DNA; note = Description of Artificial Sequence: Synthetic oligonucleotide
aacttcctttttattgacca

SEQ ID NO: 25879 - DNA, 20 bp, synthetic construct
  source 1..20: mol_type = other DNA; note = Description of Artificial Sequence: Synthetic oligonucleotide
caacttcctttttattgacc

SEQ ID NO: 25880 - DNA, 20 bp, synthetic construct
  source 1..20: mol_type = other DNA; note = Description of Artificial Sequence: Synthetic oligonucleotide
gcaacttcctttttattgac

SEQ ID NO: 25881 - DNA, 20 bp, synthetic construct
  source 1..20: mol_type = other DNA; note = Description of Artificial Sequence: Synthetic oligonucleotide
tgcaacttcctttttattga

SEQ ID NO: 25882 - DNA, 20 bp, synthetic construct
  source 1..20: mol_type = other DNA; note = Description of Artificial Sequence: Synthetic oligonucleotide
ttgcaacttcctttttattg

SEQ ID NO: 25883 - DNA, 20 bp, synthetic construct
  source 1..20: mol_type = other DNA; note = Description of Artificial Sequence: Synthetic oligonucleotide
tttgcaacttcctttttatt

SEQ ID NO: 25884 - DNA, 20 bp, synthetic construct
  source 1..20: mol_type = other DNA; note = Description of Artificial Sequence: Synthetic oligonucleotide
atttgcaacttcctttttat

SEQ ID NO: 25885 - DNA, 20 bp, synthetic construct
  source 1..20: mol_type = other DNA; note = Description of Artificial Sequence: Synthetic oligonucleotide
aatttgcaacttccttttta

SEQ ID NO: 25886 - DNA, 20 bp, synthetic construct
  source 1..20: mol_type = other DNA; note = Description of Artificial Sequence: Synthetic oligonucleotide
caatttgcaacttccttttt

SEQ ID NO: 25887 - DNA, 20 bp, synthetic construct
  source 1..20: mol_type = other DNA; note = Description of Artificial Sequence: Synthetic oligonucleotide
acaatttgcaacttcctttt

SEQ ID NO: 25888 - DNA, 20 bp, synthetic construct
  source 1..20: mol_type = other DNA; note = Description of Artificial Sequence: Synthetic oligonucleotide
cacaatttgcaacttccttt

SEQ ID NO: 25889 - DNA, 20 bp, synthetic construct
  source 1..20: mol_type = other DNA; note = Description of Artificial Sequence: Synthetic oligonucleotide
tcacaatttgcaacttcctt

SEQ ID NO: 25890 - RNA, 21 nt, synthetic construct
  source 1..21: mol_type = other RNA; note = Description of Artificial Sequence: Synthetic oligonucleotide
  modified_base 1: mod_base = OTHER; note = 2' fluoro-modified nucleoside - 2' fluoroguanosine phosphorothioate linkage
  modified_base 2: mod_base = OTHER; note = 2' O-methyl modified nucleoside - 2' O-methyladenosine phosphorothioate linkage
  modified_base 3: mod_base = OTHER; note = 2' fluoro-modified nucleoside - 2' fluoroguanosine
  modified_base 4: mod_base = OTHER; note = 2' O-methyl modified nucleoside - 2' O-methyladenosine
  modified_base 5: mod_base = OTHER; note = 2' fluoro-modified nucleoside - 2' fluorocytidine
  modified_base 6: mod_base = OTHER; note = 2' O-methyl modified nucleoside - 2' O-methyluridine
  modified_base 7: mod_base = OTHER; note = 2' fluoro-modified nucleoside - 2' fluorocytidine
  modified_base 8: mod_base = OTHER; note = 2' fluoro-modified nucleoside - 2' fluorocytidine
  modified_base 9: mod_base = OTHER; note = 2' fluoro-modified nucleoside - 2' fluoroadenosine
  modified_base 10: mod_base = OTHER; note = 2' O-methyl modified nucleoside - 2' O-methyladenosine
  modified_base 11: mod_base = OTHER; note = 2' fluoro-modified nucleoside - 2' fluorocytidine
  modified_base 12: mod_base = OTHER; note = 2' O-methyl modified nucleoside - 2' O-methyluridine
  modified_base 13: mod_base = OTHER; note = 2' fluoro-modified nucleoside - 2' fluorouridine
  modified_base 14: mod_base = OTHER; note = 2' O-methyl modified nucleoside - 2' O-methyladenosine
  modified_base 15: mod_base = OTHER; note = 2' fluoro-modified nucleoside - 2' fluoroadenosine
  modified_base 16: mod_base = OTHER; note = 2' O-methyl modified nucleoside - 2' O-methylguanosine
  modified_base 17: mod_base = OTHER; note = 2' fluoro-modified nucleoside - 2' fluoroguanosine
  modified_base 18: mod_base = OTHER; note = 2' O-methyl modified nucleoside - 2' O-methylcytidine
  modified_base 19: mod_base = OTHER; note = 2' fluoro-modified nucleoside - 2' fluoroadenosine phosphorothioate linkage
  modified_base 20: mod_base = OTHER; note = 2' O-methyl modified nucleoside - 2' O-methyluridine phosphorothioate linkage
  modified_base 21: mod_base = OTHER; note = 2' O-methyl modified nucleoside - 2' O-methyluridine
gagactccaacttaaggcatt

SEQ ID NO: 25891 - RNA, 21 nt, synthetic construct
  source 1..21: mol_type = other RNA; note = Description of Artificial Sequence: Synthetic oligonucleotide
  modified_base 1: mod_base = OTHER; note = 2' fluoro-modified nucleoside - 2' fluoroadenosine phosphorothioate linkage
  modified_base 2: mod_base = OTHER; note = 2' O-methyl modified nucleoside - 2' O-methylguanosine phosphorothioate linkage
  modified_base 3: mod_base = OTHER; note = 2' fluoro-modified nucleoside - 2' fluoroadenosine
  modified_base 4: mod_base = OTHER; note = 2' O-methyl modified nucleoside - 2' O-methylcytidine
  modified_base 5: mod_base = OTHER; note = 2' fluoro-modified nucleoside - 2' fluorouridine
  modified_base 6: mod_base = OTHER; note = 2' O-methyl modified nucleoside - 2' O-methylcytidine
  modified_base 7: mod_base = OTHER; note = 2' fluoro-modified nucleoside - 2' fluorocytidine
  modified_base 8: mod_base = OTHER; note = 2' fluoro-modified nucleoside - 2' fluoroadenosine
  modified_base 9: mod_base = OTHER; note = 2' fluoro-modified nucleoside - 2' fluoroadenosine
  modified_base 10: mod_base = OTHER; note = 2' O-methyl modified nucleoside - 2' O-methylcytidine
  modified_base 11: mod_base = OTHER; note = 2' fluoro-modified nucleoside - 2' fluorouridine
  modified_base 12: mod_base = OTHER; note = 2' O-methyl modified nucleoside - 2' O-methyluridine
  modified_base 13: mod_base = OTHER; note = 2' fluoro-modified nucleoside - 2' fluoroadenosine
  modified_base 14: mod_base = OTHER; note = 2' O-methyl modified nucleoside - 2' O-methyladenosine
  modified_base 15: mod_base = OTHER; note = 2' fluoro-modified nucleoside - 2' fluoroguanosine
  modified_base 16: mod_base = OTHER; note = 2' O-methyl modified nucleoside - 2' O-methylguanosine
  modified_base 17: mod_base = OTHER; note = 2' fluoro-modified nucleoside - 2' fluorocytidine
  modified_base 18: mod_base = OTHER; note = 2' O-methyl modified nucleoside - 2' O-methyladenosine
  modified_base 19: mod_base = OTHER; note = 2' fluoro-modified nucleoside - 2' fluoroadenosine phosphorothioate linkage
  modified_base 20: mod_base = OTHER; note = 2' O-methyl modified nucleoside - 2' O-methyluridine phosphorothioate linkage
  modified_base 21: mod_base = OTHER; note = 2' O-methyl modified nucleoside - 2' O-methyluridine
agactccaacttaaggcaatt

SEQ ID NO: 25892 - RNA, 21 nt, synthetic construct
  source 1..21: mol_type = other RNA; note = Description of Artificial Sequence: Synthetic oligonucleotide
  modified_base 1: mod_base = OTHER; note = 2' fluoro-modified nucleoside - 2' fluorocytidine phosphorothioate linkage
  modified_base 2: mod_base = OTHER; note = 2' O-methyl modified nucleoside - 2' O-methylcytidine phosphorothioate linkage
  modified_base 3: mod_base = OTHER; note = 2' fluoro-modified nucleoside - 2' fluoroadenosine
  modified_base 4: mod_base = OTHER; note = 2' O-methyl modified nucleoside - 2' O-methyladenosine
  modified_base 5: mod_base = OTHER; note = 2' fluoro-modified nucleoside - 2' fluorocytidine
  modified_base 6: mod_base = OTHER; note = 2' O-methyl modified nucleoside - 2' O-methyluridine
  modified_base 7: mod_base = OTHER; note = 2' fluoro-modified nucleoside - 2' fluorouridine
  modified_base 8: mod_base = OTHER; note = 2' fluoro-modified nucleoside - 2' fluoroadenosine
  modified_base 9: mod_base = OTHER; note = 2' fluoro-modified nucleoside - 2' fluoroadenosine
  modified_base 10: mod_base = OTHER; note = 2' O-methyl modified nucleoside - 2' O-methylguanosine
  modified_base 11: mod_base = OTHER; note = 2' fluoro-modified nucleoside - 2' fluoroguanosine
  modified_base 12: mod_base = OTHER; note = 2' O-methyl modified nucleoside - 2' O-methylcytidine
  modified_base 13: mod_base = OTHER; note = 2' fluoro-modified nucleoside - 2' fluoroadenosine
  modified_base 14: mod_base = OTHER; note = 2' O-methyl modified nucleoside - 2' O-methyladenosine
  modified_base 15: mod_base = OTHER; note = 2' fluoro-modified nucleoside - 2' fluorocytidine
  modified_base 16: mod_base = OTHER; note = 2' O-methyl modified nucleoside - 2' O-methyladenosine
  modified_base 17: mod_base = OTHER; note = 2' fluoro-modified nucleoside - 2' fluoroguanosine
  modified_base 18: mod_base = OTHER; note = 2' O-methyl modified nucleoside - 2' O-methylcytidine
  modified_base 19: mod_base = OTHER; note = 2' fluoro-modified nucleoside - 2' fluoroadenosine phosphorothioate linkage
  modified_base 20: mod_base = OTHER; note = 2' O-methyl modified nucleoside - 2' O-methyluridine phosphorothioate linkage
  modified_base 21: mod_base = OTHER; note = 2' O-methyl modified nucleoside - 2' O-methyluridine
ccaacttaaggcaacagcatt

SEQ ID NO: 25893 - RNA, 21 nt, synthetic construct
  source 1..21: mol_type = other RNA; note = Description of Artificial Sequence: Synthetic oligonucleotide
  modified_base 1: mod_base = OTHER; note = 2' fluoro-modified nucleoside - 2' fluorocytidine phosphorothioate linkage
  modified_base 2: mod_base = OTHER; note = 2' O-methyl modified nucleoside - 2' O-methyladenosine phosphorothioate linkage
  modified_base 3: mod_base = OTHER; note = 2' fluoro-modified nucleoside - 2' fluoroadenosine
  modified_base 4: mod_base = OTHER; note = 2' O-methyl modified nucleoside - 2' O-methylcytidine
  modified_base 5: mod_base = OTHER; note = 2' fluoro-modified nucleoside - 2' fluorouridine
  modified_base 6: mod_base = OTHER; note = 2' O-methyl modified nucleoside - 2' O-methyluridine
  modified_base 7: mod_base = OTHER; note = 2' fluoro-modified nucleoside - 2' fluoroadenosine
  modified_base 8: mod_base = OTHER; note = 2' fluoro-modified nucleoside - 2' fluoroadenosine
  modified_base 9: mod_base = OTHER; note = 2' fluoro-modified nucleoside - 2' fluoroguanosine
  modified_base 10: mod_base = OTHER; note = 2' O-methyl modified nucleoside - 2' O-methylguanosine
  modified_base 11: mod_base = OTHER; note = 2' fluoro-modified nucleoside - 2' fluorocytidine
  modified_base 12: mod_base = OTHER; note = 2' O-methyl modified nucleoside - 2' O-methyladenosine
  modified_base 13: mod_base = OTHER; note = 2' fluoro-modified nucleoside - 2' fluoroadenosine
  modified_base 14: mod_base = OTHER; note = 2' O-methyl modified nucleoside - 2' O-methylcytidine
  modified_base 15: mod_base = OTHER; note = 2' fluoro-modified nucleoside - 2' fluoroadenosine
  modified_base 16: mod_base = OTHER; note = 2' O-methyl modified nucleoside - 2' O-methylguanosine
  modified_base 17: mod_base = OTHER; note = 2' fluoro-modified nucleoside - 2' fluorocytidine
  modified_base 18: mod_base = OTHER; note = 2' O-methyl modified nucleoside - 2' O-methyladenosine
  modified_base 19: mod_base = OTHER; note = 2' fluoro-modified nucleoside - 2' fluoroadenosine phosphorothioate linkage
  modified_base 20: mod_base = OTHER; note = 2' O-methyl modified nucleoside - 2' O-methyluridine phosphorothioate linkage
  modified_base 21: mod_base = OTHER; note = 2' O-methyl modified nucleoside - 2' O-methyluridine
caacttaaggcaacagcaatt

SEQ ID NO: 25894 - RNA, 21 nt, synthetic construct
  source 1..21: mol_type = other RNA; note = Description of Artificial Sequence: Synthetic oligonucleotide
  modified_base 1: mod_base = OTHER; note = 2' fluoro-modified nucleoside - 2' fluoroadenosine phosphorothioate linkage
  modified_base 2: mod_base = OTHER; note = 2' O-methyl modified nucleoside - 2' O-methylcytidine phosphorothioate linkage
  modified_base 3: mod_base = OTHER; note = 2' fluoro-modified nucleoside - 2' fluorouridine
  modified_base 4: mod_base = OTHER; note = 2' O-methyl modified nucleoside - 2' O-methyluridine
  modified_base 5: mod_base = OTHER; note = 2' fluoro-modified nucleoside - 2' fluoroadenosine
  modified_base 6: mod_base = OTHER; note = 2' O-methyl modified nucleoside - 2' O-methyladenosine
  modified_base 7: mod_base = OTHER; note = 2' fluoro-modified nucleoside - 2' fluoroguanosine
  modified_base 8: mod_base = OTHER; note = 2' fluoro-modified nucleoside - 2' fluoroguanosine
  modified_base 9: mod_base = OTHER; note = 2' fluoro-modified nucleoside - 2' fluorocytidine
  modified_base 10: mod_base = OTHER; note = 2' O-methyl modified nucleoside - 2' O-methyladenosine
  modified_base 11: mod_base = OTHER; note = 2' fluoro-modified nucleoside - 2' fluoroadenosine
  modified_base 12: mod_base = OTHER; note = 2' O-methyl modified nucleoside - 2' O-methylcytidine
  modified_base 13: mod_base = OTHER; note = 2' fluoro-modified nucleoside - 2' fluoroadenosine
  modified_base 14: mod_base = OTHER; note = 2' O-methyl modified nucleoside - 2' O-methylguanosine
  modified_base 15: mod_base = OTHER; note = 2' fluoro-modified nucleoside - 2' fluorocytidine
  modified_base 16: mod_base = OTHER; note = 2' O-methyl modified nucleoside - 2' O-methyladenosine
  modified_base 17: mod_base = OTHER; note = 2' fluoro-modified nucleoside - 2' fluorouridine
  modified_base 18: mod_base = OTHER; note = 2' O-methyl modified nucleoside - 2' O-methylguanosine
  modified_base 19: mod_base = OTHER; note = 2' fluoro-modified nucleoside - 2' fluoroadenosine phosphorothioate linkage
  modified_base 20: mod_base = OTHER; note = 2' O-methyl modified nucleoside - 2' O-methyluridine phosphorothioate linkage
  modified_base 21: mod_base = OTHER; note = 2' O-methyl modified nucleoside - 2' O-methyluridine
acttaaggcaacagcatgatt

SEQ ID NO: 25895 - RNA, 21 nt, synthetic construct
  source 1..21: mol_type = other RNA; note = Description of Artificial Sequence: Synthetic oligonucleotide
  modified_base 1: mod_base = OTHER; note = 2' fluoro-modified nucleoside - 2' fluoroguanosine phosphorothioate linkage
  modified_base 2: mod_base = OTHER; note = 2' O-methyl modified nucleoside - 2' O-methylcytidine phosphorothioate linkage
  modified_base 3: mod_base = OTHER; note = 2' fluoro-modified nucleoside - 2' fluoroadenosine
  modified_base 4: mod_base = OTHER; note = 2' O-methyl modified nucleoside - 2' O-methyladenosine
  modified_base 5: mod_base = OTHER; note = 2' fluoro-modified nucleoside - 2' fluorocytidine
  modified_base 6: mod_base = OTHER; note = 2' O-methyl modified nucleoside - 2' O-methyladenosine
  modified_base 7: mod_base = OTHER; note = 2' fluoro-modified nucleoside - 2' fluoroguanosine
  modified_base 8: mod_base = OTHER; note = 2' fluoro-modified nucleoside - 2' fluorocytidine
  modified_base 9: mod_base = OTHER; note = 2' fluoro-modified nucleoside - 2' fluoroadenosine
  modified_base 10: mod_base = OTHER; note = 2' O-methyl modified nucleoside - 2' O-methyluridine
  modified_base 11: mod_base = OTHER; note = 2' fluoro-modified nucleoside - 2' fluoroguanosine
  modified_base 12: mod_base = OTHER; note = 2' O-methyl modified nucleoside - 2' O-methylguanosine
  modified_base 13: mod_base = OTHER; note = 2' fluoro-modified nucleoside - 2' fluoroguanosine
  modified_base 14: mod_base = OTHER; note = 2' O-methyl modified nucleoside - 2' O-methyluridine
  modified_base 15: mod_base = OTHER; note = 2' fluoro-modified nucleoside - 2' fluoroguanosine
  modified_base 16: mod_base = OTHER; note = 2' O-methyl modified nucleoside - 2' O-methyladenosine
  modified_base 17: mod_base = OTHER; note = 2' fluoro-modified nucleoside - 2' fluoroadenosine
  modified_base 18: mod_base = OTHER; note = 2' O-methyl modified nucleoside - 2' O-methyluridine
  modified_base 19: mod_base = OTHER; note = 2' fluoro-modified nucleoside - 2' fluoroadenosine phosphorothioate linkage
  modified_base 20: mod_base = OTHER; note = 2' O-methyl modified nucleoside - 2' O-methyluridine phosphorothioate linkage
  modified_base 21: mod_base = OTHER; note = 2' O-methyl modified nucleoside - 2' O-methyluridine
gcaacagcatgggtgaatatt

SEQ ID NO: 25896 - RNA, 21 nt, synthetic construct
  source 1..21: mol_type = other RNA; note = Description of Artificial Sequence: Synthetic oligonucleotide
  modified_base 1: mod_base = OTHER; note = 2' fluoro-modified nucleoside - 2' fluoroadenosine phosphorothioate linkage
  modified_base 2: mod_base = OTHER; note = 2' O-methyl modified nucleoside - 2' O-methyladenosine phosphorothioate linkage
  modified_base 3: mod_base = OTHER; note = 2' fluoro-modified nucleoside - 2' fluorocytidine
  modified_base 4: mod_base = OTHER; note = 2' O-methyl modified nucleoside - 2' O-methyladenosine
  modified_base 5: mod_base = OTHER; note = 2' fluoro-modified nucleoside - 2' fluoroguanosine
  modified_base 6: mod_base = OTHER; note = 2' O-methyl modified nucleoside - 2' O-methylcytidine
  modified_base 7: mod_base = OTHER; note = 2' fluoro-modified nucleoside - 2' fluoroadenosine
  modified_base 8: mod_base = OTHER; note = 2' fluoro-modified nucleoside - 2' fluorouridine
  modified_base 9: mod_base = OTHER; note = 2' fluoro-modified nucleoside - 2' fluoroguanosine
  modified_base 10: mod_base = OTHER; note = 2' O-methyl modified nucleoside - 2' O-methylguanosine
  modified_base 11: mod_base = OTHER; note = 2' fluoro-modified nucleoside - 2' fluoroguanosine
  modified_base 12: mod_base = OTHER; note = 2' O-methyl modified nucleoside - 2' O-methyluridine
  modified_base 13: mod_base = OTHER; note = 2' fluoro-modified nucleoside - 2' fluoroguanosine
  modified_base 14: mod_base = OTHER; note = 2' O-methyl modified nucleoside - 2' O-methyladenosine
  modified_base 15: mod_base = OTHER; note = 2' fluoro-modified nucleoside - 2' fluoroadenosine
  modified_base 16: mod_base = OTHER; note = 2' O-methyl modified nucleoside - 2' O-methyluridine
  modified_base 17: mod_base = OTHER; note = 2' fluoro-modified nucleoside - 2' fluoroadenosine
  modified_base 18: mod_base = OTHER; note = 2' O-methyl modified nucleoside - 2' O-methyladenosine
  modified_base 19: mod_base = OTHER; note = 2' fluoro-modified nucleoside - 2' fluoroadenosine phosphorothioate linkage
  modified_base 20: mod_base = OTHER; note = 2' O-methyl modified nucleoside - 2' O-methyluridine phosphorothioate linkage
  modified_base 21: mod_base = OTHER; note = 2' O-methyl modified nucleoside - 2' O-methyluridine
aacagcatgggtgaataaatt

SEQ ID NO: 25897 - RNA, 21 nt, synthetic construct
  source 1..21: mol_type = other RNA; note = Description of Artificial Sequence: Synthetic oligonucleotide
  modified_base 1: mod_base = OTHER; note = 2' fluoro-modified nucleoside - 2' fluoroadenosine phosphorothioate linkage
  modified_base 2: mod_base = OTHER; note = 2' O-methyl modified nucleoside - 2' O-methylcytidine phosphorothioate linkage
  modified_base 3: mod_base = OTHER; note = 2' fluoro-modified nucleoside - 2' fluoroadenosine
  modified_base 4: mod_base = OTHER; note = 2' O-methyl modified nucleoside - 2' O-methylguanosine
  modified_base 5: mod_base = OTHER; note = 2' fluoro-modified nucleoside - 2' fluorocytidine
  modified_base 6: mod_base = OTHER; note = 2' O-methyl modified nucleoside - 2' O-methyladenosine
  modified_base 7: mod_base = OTHER; note = 2' fluoro-modified nucleoside - 2' fluorouridine
  modified_base 8: mod_base = OTHER; note = 2' fluoro-modified nucleoside - 2' fluoroguanosine
  modified_base 9: mod_base = OTHER; note = 2' fluoro-modified nucleoside - 2' fluoroguanosine
  modified_base 10: mod_base = OTHER; note = 2' O-methyl modified nucleoside - 2' O-methylguanosine
  modified_base 11: mod_base = OTHER; note = 2' fluoro-modified nucleoside - 2' fluorouridine
  modified_base 12: mod_base = OTHER; note = 2' O-methyl modified nucleoside - 2' O-methylguanosine
  modified_base 13: mod_base = OTHER; note = 2' fluoro-modified nucleoside - 2' fluoroadenosine
  modified_base 14: mod_base = OTHER; note = 2' O-methyl modified nucleoside - 2' O-methyladenosine
  modified_base 15: mod_base = OTHER; note = 2' fluoro-modified nucleoside - 2' fluorouridine
  modified_base 16: mod_base = OTHER; note = 2' O-methyl modified nucleoside - 2' O-methyladenosine
  modified_base 17: mod_base = OTHER; note = 2' fluoro-modified nucleoside - 2' fluoroadenosine
  modified_base 18: mod_base = OTHER; note = 2' O-methyl modified nucleoside - 2' O-methylguanosine
  modified_base 19: mod_base = OTHER; note = 2' fluoro-modified nucleoside - 2' fluoroadenosine phosphorothioate linkage
  modified_base 20: mod_base = OTHER; note = 2' O-methyl modified nucleoside - 2' O-methyluridine phosphorothioate linkage
  modified_base 21: mod_base = OTHER; note = 2' O-methyl modified nucleoside - 2' O-methyluridine
acagcatgggtgaataagatt

SEQ ID NO: 25898 - RNA, 21 nt, synthetic construct
  source 1..21: mol_type = other RNA; note = Description of Artificial Sequence: Synthetic oligonucleotide
  modified_base 1: mod_base = OTHER; note = 2' fluoro-modified nucleoside - 2' fluorocytidine phosphorothioate linkage
  modified_base 2: mod_base = OTHER; note = 2' O-methyl modified nucleoside - 2' O-methyladenosine phosphorothioate linkage
  modified_base 3: mod_base = OTHER; note = 2' fluoro-modified nucleoside - 2' fluoroguanosine
  modified_base 4: mod_base = OTHER; note = 2' O-methyl modified nucleoside - 2' O-methylcytidine
  modified_base 5: mod_base = OTHER; note = 2' fluoro-modified nucleoside - 2' fluoroadenosine
  modified_base 6: mod_base = OTHER; note = 2' O-methyl modified nucleoside - 2' O-methyluridine
  modified_base 7: mod_base = OTHER; note = 2' fluoro-modified nucleoside - 2' fluoroguanosine
  modified_base 8: mod_base = OTHER; note = 2' fluoro-modified nucleoside - 2' fluoroguanosine
  modified_base 9: mod_base = OTHER; note = 2' fluoro-modified nucleoside - 2' fluoroguanosine
  modified_base 10: mod_base = OTHER; note = 2' O-methyl modified nucleoside - 2' O-methyluridine
  modified_base 11: mod_base = OTHER; note = 2' fluoro-modified nucleoside - 2' fluoroguanosine
  modified_base 12: mod_base = OTHER; note = 2' O-methyl modified nucleoside - 2' O-methyladenosine
  modified_base 13: mod_base = OTHER; note = 2' fluoro-modified nucleoside - 2' fluoroadenosine
  modified_base 14: mod_base = OTHER; note = 2' O-methyl modified nucleoside - 2' O-methyluridine
  modified_base 15: mod_base = OTHER; note = 2' fluoro-modified nucleoside - 2' fluoroadenosine
  modified_base 16: mod_base = OTHER; note = 2' O-methyl modified nucleoside - 2' O-methyladenosine
  modified_base 17: mod_base = OTHER; note = 2' fluoro-modified nucleoside - 2' fluoroguanosine
  modified_base 18: mod_base = OTHER; note = 2' O-methyl modified nucleoside - 2' O-methylguanosine
  modified_base 19: mod_base = OTHER; note = 2' fluoro-modified nucleoside - 2' fluoroadenosine phosphorothioate linkage
  modified_base 20: mod_base = OTHER; note = 2' O-methyl modified nucleoside - 2' O-methyluridine phosphorothioate linkage
  modified_base 21: mod_base = OTHER; note = 2' O-methyl modified nucleoside - 2' O-methyluridine
cagcatgggtgaataaggatt

SEQ ID NO: 25899 - RNA, 21 nt, synthetic construct
  source 1..21: mol_type = other RNA; note = Description of Artificial Sequence: Synthetic oligonucleotide
  modified_base 1: mod_base = OTHER; note = 2' fluoro-modified nucleoside - 2' fluoroadenosine phosphorothioate linkage
  modified_base 2: mod_base = OTHER; note = 2' O-methyl modified nucleoside - 2' O-methylguanosine phosphorothioate linkage
  modified_base 3: mod_base = OTHER; note = 2' fluoro-modified nucleoside - 2' fluorocytidine
  modified_base 4: mod_base = OTHER; note = 2' O-methyl modified nucleoside - 2' O-methyladenosine
  modified_base 5: mod_base = OTHER; note = 2' fluoro-modified nucleoside - 2' fluorouridine
  modified_base 6: mod_base = OTHER; note = 2' O-methyl modified nucleoside - 2' O-methylguanosine
  modified_base 7: mod_base = OTHER; note = 2' fluoro-modified nucleoside - 2' fluoroguanosine
  modified_base 8: mod_base = OTHER; note = 2' fluoro-modified nucleoside - 2' fluoroguanosine
  modified_base 9: mod_base = OTHER; note = 2' fluoro-modified nucleoside - 2' fluorouridine
  modified_base 10: mod_base = OTHER; note = 2' O-methyl modified nucleoside - 2' O-methylguanosine
  modified_base 11: mod_base = OTHER; note = 2' fluoro-modified nucleoside - 2' fluoroadenosine
  modified_base 12: mod_base = OTHER; note = 2' O-methyl modified nucleoside - 2' O-methyladenosine
  modified_base 13: mod_base = OTHER; note = 2' fluoro-modified nucleoside - 2' fluorouridine
  modified_base 14: mod_base = OTHER; note = 2' O-methyl modified nucleoside - 2' O-methyladenosine
  modified_base 15: mod_base = OTHER; note = 2' fluoro-modified nucleoside - 2' fluoroadenosine
  modified_base 16: mod_base = OTHER; note = 2' O-methyl modified nucleoside - 2' O-methylguanosine
  modified_base 17: mod_base = OTHER; note = 2' fluoro-modified nucleoside - 2' fluoroguanosine
  modified_base 18: mod_base = OTHER; note = 2' O-methyl modified nucleoside - 2' O-methylguanosine
  modified_base 19: mod_base = OTHER; note = 2' fluoro-modified nucleoside - 2' fluoroadenosine phosphorothioate linkage
  modified_base 20: mod_base = OTHER; note = 2' O-methyl modified nucleoside - 2' O-methyluridine phosphorothioate linkage
  modified_base 21: mod_base = OTHER; note = 2' O-methyl modified nucleoside - 2' O-methyluridine
agcatgggtgaataagggatt

SEQ ID NO: 25900 - RNA, 21 nt, synthetic construct
  source 1..21: mol_type = other RNA; note = Description of Artificial Sequence: Synthetic oligonucleotide
  modified_base 1: mod_base = OTHER; note = 2' fluoro-modified nucleoside - 2' fluoroadenosine phosphorothioate linkage
  modified_base 2: mod_base = OTHER; note = 2' O-methyl modified nucleoside - 2' O-methyluridine phosphorothioate linkage
  modified_base 3: mod_base = OTHER; note = 2' fluoro-modified nucleoside - 2' fluoroadenosine
  modified_base 4: mod_base = OTHER; note = 2' O-methyl modified nucleoside - 2' O-methyladenosine
  modified_base 5: mod_base = OTHER; note = 2' fluoro-modified nucleoside - 2' fluoroguanosine
  modified_base 6: mod_base = OTHER; note = 2' O-methyl modified nucleoside - 2' O-methylguanosine
  modified_base 7: mod_base = OTHER; note = 2' fluoro-modified nucleoside - 2' fluoroguanosine
  modified_base 8: mod_base = OTHER; note = 2' fluoro-modified nucleoside - 2' fluorocytidine
  modified_base 9: mod_base = OTHER; note = 2' fluoro-modified nucleoside - 2' fluorouridine
  modified_base 10: mod_base = OTHER; note = 2' O-methyl modified nucleoside - 2' O-methyluridine
  modified_base 11: mod_base = OTHER; note = 2' fluoro-modified nucleoside - 2' fluorocytidine
  modified_base 12: mod_base = OTHER; note = 2' O-methyl modified nucleoside - 2' O-methylcytidine
  modified_base 13: mod_base = OTHER; note = 2' fluoro-modified nucleoside - 2' fluorouridine
  modified_base 14: mod_base = OTHER; note = 2' O-methyl modified nucleoside - 2' O-methylguanosine
  modified_base 15: mod_base = OTHER; note = 2' fluoro-modified nucleoside - 2' fluorouridine
  modified_base 16: mod_base = OTHER; note = 2' O-methyl modified nucleoside - 2' O-methylguanosine
  modified_base 17: mod_base = OTHER; note = 2' fluoro-modified nucleoside - 2' fluoroguanosine
  modified_base 18: mod_base = OTHER; note = 2' O-methyl modified nucleoside - 2' O-methyladenosine
  modified_base 19: mod_base = OTHER; note = 2' fluoro-modified nucleoside - 2' fluoroadenosine phosphorothioate linkage
  modified_base 20: mod_base = OTHER; note = 2' O-methyl modified nucleoside - 2' O-methyluridine phosphorothioate linkage
  modified_base 21: mod_base = OTHER; note = 2' O-methyl modified nucleoside - 2' O-methyluridine
ataagggcttcctgtggaatt

SEQ ID NO: 25901 - RNA, 21 nt, synthetic construct
  source 1..21: mol_type = other RNA; note = Description of Artificial Sequence: Synthetic oligonucleotide
  modified_base 1: mod_base = OTHER; note = 2' fluoro-modified nucleoside - 2' fluoroguanosine phosphorothioate linkage
  modified_base 2: mod_base = OTHER; note = 2' O-methyl modified nucleoside - 2' O-methylcytidine phosphorothioate linkage
  modified_base 3: mod_base = OTHER; note = 2' fluoro-modified nucleoside - 2' fluoroadenosine
  modified_base 4: mod_base = OTHER; note = 2' O-methyl modified nucleoside - 2' O-methyladenosine
  modified_base 5: mod_base = OTHER; note = 2' fluoro-modified nucleoside - 2' fluoroadenosine
  modified_base 6: mod_base = OTHER; note = 2' O-methyl modified nucleoside - 2' O-methyladenosine
  modified_base 7: mod_base = OTHER; note = 2' fluoro-modified nucleoside - 2' fluorocytidine
  modified_base 8: mod_base = OTHER; note = 2' fluoro-modified nucleoside - 2' fluorocytidine
  modified_base 9: mod_base = OTHER; note = 2' fluoro-modified nucleoside - 2' fluorouridine
  modified_base 10: mod_base = OTHER; note = 2' O-methyl modified nucleoside - 2' O-methylguanosine
  modified_base 11: mod_base = OTHER; note = 2' fluoro-modified nucleoside - 2' fluoroguanosine
  modified_base 12: mod_base = OTHER; note = 2' O-methyl modified nucleoside - 2' O-methyluridine
  modified_base 13: mod_base = OTHER; note = 2' fluoro-modified nucleoside - 2' fluoroguanosine
  modified_base 14: mod_base = OTHER; note = 2' O-methyl modified nucleoside - 2' O-methylcytidine
  modified_base 15: mod_base = OTHER; note = 2' fluoro-modified nucleoside - 2' fluorouridine
  modified_base 16: mod_base = OTHER; note = 2' O-methyl modified nucleoside - 2' O-methyluridine
  modified_base 17: mod_base = OTHER; note = 2' fluoro-modified nucleoside - 2' fluoroguanosine
  modified_base 18: mod_base = OTHER; note = 2' O-methyl modified nucleoside - 2' O-methyladenosine
  modified_base 19: mod_base = OTHER; note = 2' fluoro-modified nucleoside - 2' fluoroadenosine phosphorothioate linkage
  modified_base 20: mod_base = OTHER; note = 2' O-methyl modified nucleoside - 2' O-methyluridine phosphorothioate linkage
  modified_base 21: mod_base = OTHER; note = 2' O-methyl modified nucleoside - 2' O-methyluridine
gcaaaacctggtgcttgaatt

SEQ ID NO: 25902 - RNA, 21 nt, synthetic construct
  source 1..21: mol_type = other RNA; note = Description of Artificial Sequence: Synthetic oligonucleotide
  modified_base 1: mod_base = OTHER; note = 2' fluoro-modified nucleoside - 2' fluorocytidine phosphorothioate linkage
  modified_base 2: mod_base = OTHER; note = 2' O-methyl modified nucleoside - 2' O-methyladenosine phosphorothioate linkage
  modified_base 3: mod_base = OTHER; note = 2' fluoro-modified nucleoside - 2' fluoroadenosine
  modified_base 4: mod_base = OTHER; note = 2' O-methyl modified nucleoside - 2' O-methyladenosine
  modified_base 5: mod_base = OTHER; note = 2' fluoro-modified nucleoside - 2' fluoroadenosine
  modified_base 6: mod_base = OTHER; note = 2' O-methyl modified nucleoside - 2' O-methylcytidine
  modified_base 7: mod_base = OTHER; note = 2' fluoro-modified nucleoside - 2' fluorocytidine
  modified_base 8: mod_base = OTHER; note = 2' fluoro-modified nucleoside - 2' fluorouridine
  modified_base 9: mod_base = OTHER; note = 2' fluoro-modified nucleoside - 2' fluoroguanosine
  modified_base 10: mod_base = OTHER; note = 2' O-methyl modified nucleoside - 2' O-methylguanosine
  modified_base 11: mod_base = OTHER; note = 2' fluoro-modified nucleoside - 2' fluorouridine
  modified_base 12: mod_base = OTHER; note = 2' O-methyl modified nucleoside - 2' O-methylguanosine
  modified_base 13: mod_base = OTHER; note = 2' fluoro-modified nucleoside - 2' fluorocytidine
  modified_base 14: mod_base = OTHER; note = 2' O-methyl modified nucleoside - 2' O-methyluridine
  modified_base 15: mod_base = OTHER; note = 2' fluoro-modified nucleoside - 2' fluorouridine
  modified_base 16: mod_base = OTHER; note = 2' O-methyl modified nucleoside - 2' O-methylguanosine
  modified_base 17: mod_base = OTHER; note = 2' fluoro-modified nucleoside - 2' fluoroadenosine
  modified_base 18: mod_base = OTHER; note = 2' O-methyl modified nucleoside - 2' O-methylguanosine
  modified_base 19: mod_base = OTHER; note = 2' fluoro-modified nucleoside - 2' fluoroadenosine phosphorothioate linkage
  modified_base 20: mod_base = OTHER; note = 2' O-methyl modified nucleoside - 2' O-methyluridine phosphorothioate linkage
  modified_base 21: mod_base = OTHER; note = 2' O-methyl modified nucleoside - 2' O-methyluridine
caaaacctggtgcttgagatt

SEQ ID NO: 25903 - RNA, 21 nt, synthetic construct
  source 1..21: mol_type = other RNA; note = Description of Artificial Sequence: Synthetic oligonucleotide
  modified_base 1: mod_base = OTHER; note = 2' fluoro-modified nucleoside - 2' fluoroguanosine phosphorothioate linkage
  modified_base 2: mod_base = OTHER; note = 2' O-methyl modified nucleoside - 2' O-methylguanosine phosphorothioate linkage
  modified_base 3: mod_base = OTHER; note = 2' fluoro-modified nucleoside - 2' fluorouridine
  modified_base 4: mod_base = OTHER; note = 2' O-methyl modified nucleoside - 2' O-methylguanosine
  modified_base 5: mod_base = OTHER; note = 2' fluoro-modified nucleoside - 2' fluorocytidine
  modified_base 6: mod_base = OTHER; note = 2' O-methyl modified nucleoside - 2' O-methyluridine
  modified_base 7: mod_base = OTHER; note = 2' fluoro-modified nucleoside - 2' fluorouridine
  modified_base 8: mod_base = OTHER; note = 2' fluoro-modified nucleoside - 2' fluoroguanosine
  modified_base 9: mod_base = OTHER; note = 2' fluoro-modified nucleoside - 2' fluoroadenosine
  modified_base 10: mod_base = OTHER; note = 2' O-methyl modified nucleoside - 2' O-methylguanosine
  modified_base 11: mod_base = OTHER; note = 2' fluoro-modified nucleoside - 2' fluorocytidine
  modified_base 12: mod_base = OTHER; note = 2' O-methyl modified nucleoside - 2' O-methyladenosine
  modified_base 13: mod_base = OTHER; note = 2' fluoro-modified nucleoside - 2' fluorocytidine
  modified_base 14: mod_base = OTHER; note = 2' O-methyl modified nucleoside - 2' O-methyluridine
  modified_base 15: mod_base = OTHER; note = 2' fluoro-modified nucleoside - 2' fluoroguanosine
  modified_base 16: mod_base = OTHER; note = 2' O-methyl modified nucleoside - 2' O-methylguanosine
  modified_base 17: mod_base = OTHER; note = 2' fluoro-modified nucleoside - 2' fluorocytidine
  modified_base 18: mod_base = OTHER; note = 2' O-methyl modified nucleoside - 2' O-methylcytidine
  modified_base 19: mod_base = OTHER; note = 2' fluoro-modified nucleoside - 2' fluoroadenosine phosphorothioate linkage
  modified_base 20: mod_base = OTHER; note = 2' O-methyl modified nucleoside - 2' O-methyluridine phosphorothioate linkage
  modified_base 21: mod_base = OTHER; note = 2' O-methyl modified nucleoside - 2' O-methyluridine
ggtgcttgagcactggccatt

SEQ ID NO: 25904 - RNA, 21 nt, synthetic construct
  source 1..21: mol_type = other RNA; note = Description of Artificial Sequence: Synthetic oligonucleotide
  modified_base 1: mod_base = OTHER; note = 2' fluoro-modified nucleoside - 2' fluoroadenosine phosphorothioate linkage
  modified_base 2: mod_base = OTHER; note = 2' O-methyl modified nucleoside - 2' O-methylguanosine phosphorothioate linkage
  modified_base 3: mod_base = OTHER; note = 2' fluoro-modified nucleoside - 2' fluoroguanosine
  modified_base 4: mod_base = OTHER; note = 2' O-methyl modified nucleoside - 2' O-methylcytidine
  modified_base 5: mod_base = OTHER; note = 2' fluoro-modified nucleoside - 2' fluoroadenosine
  modified_base 6: mod_base = OTHER; note = 2' O-methyl modified nucleoside - 2' O-methylguanosine
  modified_base 7: mod_base = OTHER; note = 2' fluoro-modified nucleoside - 2' fluoroguanosine
  modified_base 8: mod_base = OTHER; note = 2' fluoro-modified nucleoside - 2' fluorocytidine
  modified_base 9: mod_base = OTHER; note = 2' fluoro-modified nucleoside - 2' fluorocytidine
  modified_base 10: mod_base = OTHER; note = 2' O-methyl modified nucleoside - 2' O-methyluridine
  modified_base 11: mod_base = OTHER; note = 2' fluoro-modified nucleoside - 2' fluorouridine
  modified_base 12: mod_base = OTHER; note = 2' O-methyl modified nucleoside - 2' O-methyladenosine
  modified_base 13: mod_base = OTHER; note = 2' fluoro-modified nucleoside - 2' fluorocytidine
  modified_base 14: mod_base = OTHER; note = 2' O-methyl modified nucleoside - 2' O-methyladenosine
  modified_base 15: mod_base = OTHER; note = 2' fluoro-modified nucleoside - 2' fluoroguanosine
  modified_base 16: mod_base = OTHER; note = 2' O-methyl modified nucleoside - 2' O-methyladenosine
  modified_base 17: mod_base = OTHER; note = 2' fluoro-modified nucleoside - 2' fluorouridine
  modified_base 18: mod_base = OTHER; note = 2' O-methyl modified nucleoside - 2' O-methylcytidine
  modified_base 19: mod_base = OTHER; note = 2' fluoro-modified nucleoside - 2' fluoroadenosine phosphorothioate linkage
  modified_base 20: mod_base = OTHER; note = 2' O-methyl modified nucleoside - 2' O-methyluridine phosphorothioate linkage
  modified_base 21: mod_base = OTHER; note = 2' O-methyl modified nucleoside - 2' O-methyluridine
aggcaggccttacagatcatt

SEQ ID NO: 25905 - RNA, 21 nt, synthetic construct
  source 1..21: mol_type = other RNA; note = Description of Artificial Sequence: Synthetic oligonucleotide
  modified_base 1: mod_base = OTHER; note = 2' fluoro-modified nucleoside - 2' fluoroadenosine phosphorothioate linkage
  modified_base 2: mod_base = OTHER; note = 2' O-methyl modified nucleoside - 2' O-methylguanosine phosphorothioate linkage
  modified_base 3: mod_base = OTHER; note = 2' fluoro-modified nucleoside - 2' fluoroguanosine
  modified_base 4: mod_base = OTHER; note = 2' O-methyl modified nucleoside - 2' O-methylcytidine
  modified_base 5: mod_base = OTHER; note = 2' fluoro-modified nucleoside - 2' fluorocytidine
  modified_base 6: mod_base = OTHER; note = 2' O-methyl modified nucleoside - 2' O-methyluridine
  modified_base 7: mod_base = OTHER; note = 2' fluoro-modified nucleoside - 2' fluorouridine
  modified_base 8: mod_base = OTHER; note = 2' fluoro-modified nucleoside - 2' fluoroadenosine
  modified_base 9: mod_base = OTHER; note = 2' fluoro-modified nucleoside - 2' fluorocytidine
  modified_base 10: mod_base = OTHER; note = 2' O-methyl modified nucleoside - 2' O-methyladenosine
  modified_base 11: mod_base = OTHER; note = 2' fluoro-modified nucleoside - 2' fluoroguanosine
  modified_base 12: mod_base = OTHER; note = 2' O-methyl modified nucleoside - 2' O-methyladenosine
  modified_base 13: mod_base = OTHER; note = 2' fluoro-modified nucleoside - 2' fluorouridine
  modified_base 14: mod_base = OTHER; note = 2' O-methyl modified nucleoside - 2' O-methylcytidine
  modified_base 15: mod_base = OTHER; note = 2' fluoro-modified nucleoside - 2' fluorouridine
  modified_base 16: mod_base = OTHER; note = 2' O-methyl modified nucleoside - 2' O-methylcytidine
  modified_base 17: mod_base = OTHER; note = 2' fluoro-modified nucleoside - 2' fluorouridine
  modified_base 18: mod_base = OTHER; note = 2' O-methyl modified nucleoside - 2' O-methyluridine
  modified_base 19: mod_base = OTHER; note = 2' fluoro-modified nucleoside - 2' fluoroadenosine phosphorothioate linkage
  modified_base 20: mod_base = OTHER; note = 2' O-methyl modified nucleoside - 2' O-methyluridine phosphorothioate linkage
  modified_base 21: mod_base = OTHER; note = 2' O-methyl modified nucleoside - 2' O-methyluridine
aggccttacagatctcttatt

SEQ ID NO: 25906 - RNA, 21 nt, synthetic construct
  source 1..21: mol_type = other RNA; note = Description of Artificial Sequence: Synthetic oligonucleotide
  modified_base 1: mod_base = OTHER; note = 2' fluoro-modified nucleoside - 2' fluoroguanosine phosphorothioate linkage
  modified_base 2: mod_base = OTHER; note = 2' O-methyl modified nucleoside - 2' O-methylguanosine phosphorothioate linkage
  modified_base 3: mod_base = OTHER; note = 2' fluoro-modified nucleoside - 2' fluorocytidine
  modified_base 4: mod_base = OTHER; note = 2' O-methyl modified nucleoside - 2' O-methylcytidine
  modified_base 5: mod_base = OTHER; note = 2' fluoro-modified nucleoside - 2' fluorouridine
  modified_base 6: mod_base = OTHER; note = 2' O-methyl modified nucleoside - 2' O-methyluridine
  modified_base 7: mod_base = OTHER; note = 2' fluoro-modified nucleoside - 2' fluoroadenosine
  modified_base 8: mod_base = OTHER; note = 2' fluoro-modified nucleoside - 2' fluorocytidine
  modified_base 9: mod_base = OTHER; note = 2' fluoro-modified nucleoside - 2' fluoroadenosine
  modified_base 10: mod_base = OTHER; note = 2' O-methyl modified nucleoside - 2' O-methylguanosine
  modified_base 11: mod_base = OTHER; note = 2' fluoro-modified nucleoside - 2' fluoroadenosine
  modified_base 12: mod_base = OTHER; note = 2' O-methyl modified nucleoside - 2' O-methyluridine
  modified_base 13: mod_base = OTHER; note = 2' fluoro-modified nucleoside - 2' fluorocytidine
  modified_base 14: mod_base = OTHER; note = 2' O-methyl modified nucleoside - 2' O-methyluridine
  modified_base 15: mod_base = OTHER; note = 2' fluoro-modified nucleoside - 2' fluorocytidine
  modified_base 16: mod_base = OTHER; note = 2' O-methyl modified nucleoside - 2' O-methyluridine
  modified_base 17: mod_base = OTHER; note = 2' fluoro-modified nucleoside - 2' fluorouridine
  modified_base 18: mod_base = OTHER; note = 2' O-methyl modified nucleoside - 2' O-methyladenosine
  modified_base 19: mod_base = OTHER; note = 2' fluoro-modified nucleoside - 2' fluoroadenosine phosphorothioate linkage
  modified_base 20: mod_base = OTHER; note = 2' O-methyl modified nucleoside - 2' O-methyluridine phosphorothioate linkage
  modified_base 21: mod_base = OTHER; note = 2' O-methyl modified nucleoside - 2' O-methyluridine
ggccttacagatctcttaatt

SEQ ID NO: 25907 - RNA, 21 nt, synthetic construct
  source 1..21: mol_type = other RNA; note = Description of Artificial Sequence: Synthetic oligonucleotide
  modified_base 1: mod_base = OTHER; note = 2' fluoro-modified nucleoside - 2' fluoroguanosine phosphorothioate linkage
  modified_base 2: mod_base = OTHER; note = 2' O-methyl modified nucleoside - 2' O-methylcytidine phosphorothioate linkage
  modified_base 3: mod_base = OTHER; note = 2' fluoro-modified nucleoside - 2' fluorocytidine
  modified_base 4: mod_base = OTHER; note = 2' O-methyl modified nucleoside - 2' O-methyluridine
  modified_base 5: mod_base = OTHER; note = 2' fluoro-modified nucleoside - 2' fluorouridine
  modified_base 6: mod_base = OTHER; note = 2' O-methyl modified nucleoside - 2' O-methyladenosine
  modified_base 7: mod_base = OTHER; note = 2' fluoro-modified nucleoside - 2' fluorocytidine
  modified_base 8: mod_base = OTHER; note = 2' fluoro-modified nucleoside - 2' fluoroadenosine
  modified_base 9: mod_base = OTHER; note = 2' fluoro-modified nucleoside - 2' fluoroguanosine
  modified_base 10: mod_base = OTHER; note = 2' O-methyl modified nucleoside - 2' O-methyladenosine
  modified_base 11: mod_base = OTHER; note = 2' fluoro-modified nucleoside - 2' fluorouridine
  modified_base 12: mod_base = OTHER; note = 2' O-methyl modified nucleoside - 2' O-methylcytidine
  modified_base 13: mod_base = OTHER; note = 2' fluoro-modified nucleoside - 2' fluorouridine
  modified_base 14: mod_base = OTHER; note = 2' O-methyl modified nucleoside - 2' O-methylcytidine
  modified_base 15: mod_base = OTHER; note = 2' fluoro-modified nucleoside - 2' fluorouridine
  modified_base 16: mod_base = OTHER; note = 2' O-methyl modified nucleoside - 2' O-methyluridine
  modified_base 17: mod_base = OTHER; note = 2' fluoro-modified nucleoside - 2' fluoroadenosine
  modified_base 18: mod_base = OTHER; note = 2' O-methyl modified nucleoside - 2' O-methylcytidine
  modified_base 19: mod_base = OTHER; note = 2' fluoro-modified nucleoside - 2' fluoroadenosine phosphorothioate linkage
  modified_base 20: mod_base = OTHER; note = 2' O-methyl modified nucleoside - 2' O-methyluridine phosphorothioate linkage
  modified_base 21: mod_base = OTHER; note = 2' O-methyl modified nucleoside - 2' O-methyluridine
gccttacagatctcttacatt

SEQ ID NO: 25908 - RNA, 21 nt, synthetic construct
  source 1..21: mol_type = other RNA; note = Description of Artificial Sequence: Synthetic oligonucleotide
  modified_base 1: mod_base = OTHER; note = 2' fluoro-modified nucleoside - 2' fluorocytidine phosphorothioate linkage
  modified_base 2: mod_base = OTHER; note = 2' O-methyl modified nucleoside - 2' O-methyluridine phosphorothioate linkage
  modified_base 3: mod_base = OTHER; note = 2' fluoro-modified nucleoside - 2' fluorouridine
  modified_base 4: mod_base = OTHER; note = 2' O-methyl modified nucleoside - 2' O-methyladenosine
  modified_base 5: mod_base = OTHER; note = 2' fluoro-modified nucleoside - 2' fluorocytidine
  modified_base 6: mod_base = OTHER; note = 2' O-methyl modified nucleoside - 2' O-methyladenosine
  modified_base 7: mod_base = OTHER; note = 2' fluoro-modified nucleoside - 2' fluoroguanosine
  modified_base 8: mod_base = OTHER; note = 2' fluoro-modified nucleoside - 2' fluoroadenosine
  modified_base 9: mod_base = OTHER; note = 2' fluoro-modified nucleoside - 2' fluorouridine
  modified_base 10: mod_base = OTHER; note = 2' O-methyl modified nucleoside - 2' O-methylcytidine
  modified_base 11: mod_base = OTHER; note = 2' fluoro-modified nucleoside - 2' fluorouridine
  modified_base 12: mod_base = OTHER; note = 2' O-methyl modified nucleoside - 2' O-methylcytidine
  modified_base 13: mod_base = OTHER; note = 2' fluoro-modified nucleoside - 2' fluorouridine
  modified_base 14: mod_base = OTHER; note = 2' O-methyl modified nucleoside - 2' O-methyluridine
  modified_base 15: mod_base = OTHER; note = 2' fluoro-modified nucleoside - 2' fluoroadenosine
  modified_base 16: mod_base = OTHER; note = 2' O-methyl modified nucleoside - 2' O-methylcytidine
  modified_base 17: mod_base = OTHER; note = 2' fluoro-modified nucleoside - 2' fluoroadenosine
  modified_base 18: mod_base = OTHER; note = 2' O-methyl modified nucleoside - 2' O-methylcytidine
  modified_base 19: mod_base = OTHER; note = 2' fluoro-modified nucleoside - 2' fluoroadenosine phosphorothioate linkage
  modified_base 20: mod_base = OTHER; note = 2' O-methyl modified nucleoside - 2' O-methyluridine phosphorothioate linkage
  modified_base 21: mod_base = OTHER; note = 2' O-methyl modified nucleoside - 2' O-methyluridine
cttacagatctcttacacatt

SEQ ID NO: 25909 - RNA, 21 nt, synthetic construct
  source 1..21: mol_type = other RNA; note = Description of Artificial Sequence: Synthetic oligonucleotide
  modified_base 1: mod_base = OTHER; note = 2' fluoro-modified nucleoside - 2' fluorocytidine phosphorothioate linkage
  modified_base 2: mod_base = OTHER; note = 2' O-methyl modified nucleoside - 2' O-methyladenosine phosphorothioate linkage
  modified_base 3: mod_base = OTHER; note = 2' fluoro-modified nucleoside - 2' fluoroguanosine
  modified_base 4: mod_base = OTHER; note = 2' O-methyl modified nucleoside - 2' O-methyladenosine
  modified_base 5: mod_base = OTHER; note = 2' fluoro-modified nucleoside - 2' fluorouridine
  modified_base 6: mod_base = OTHER; note = 2' O-methyl modified nucleoside - 2' O-methylcytidine
  modified_base 7: mod_base = OTHER; note = 2' fluoro-modified nucleoside - 2' fluorouridine
  modified_base 8: mod_base = OTHER; note = 2' fluoro-modified nucleoside - 2' fluorocytidine
  modified_base 9: mod_base = OTHER; note = 2' fluoro-modified nucleoside - 2' fluorouridine
  modified_base 10: mod_base = OTHER; note = 2' O-methyl modified nucleoside - 2' O-methyluridine
  modified_base 11: mod_base = OTHER; note = 2' fluoro-modified nucleoside - 2' fluoroadenosine
  modified_base 12: mod_base = OTHER; note = 2' O-methyl modified nucleoside - 2' O-methylcytidine
  modified_base 13: mod_base = OTHER; note = 2' fluoro-modified nucleoside - 2' fluoroadenosine
  modified_base 14: mod_base = OTHER; note = 2' O-methyl modified nucleoside - 2' O-methylcytidine
  modified_base 15: mod_base = OTHER; note = 2' fluoro-modified nucleoside - 2' fluorouridine
  modified_base 16: mod_base = OTHER; note = 2' O-methyl modified nucleoside - 2' O-methylcytidine
  modified_base 17: mod_base = OTHER; note = 2' fluoro-modified nucleoside - 2' fluoroguanosine
  modified_base 18: mod_base = OTHER; note = 2' O-methyl modified nucleoside - 2' O-methyluridine
  modified_base 19: mod_base = OTHER; note = 2' fluoro-modified nucleoside - 2' fluoroadenosine phosphorothioate linkage
  modified_base 20: mod_base = OTHER; note = 2' O-methyl modified nucleoside - 2' O-methyluridine phosphorothioate linkage
  modified_base 21: mod_base = OTHER; note = 2' O-methyl modified nucleoside - 2' O-methyluridine
cagatctcttacactcgtatt

SEQ ID NO: 25910 - RNA, 21 nt, synthetic construct
  source 1..21: mol_type = other RNA; note = Description of Artificial Sequence: Synthetic oligonucleotide
  modified_base 1: mod_base = OTHER; note = 2' fluoro-modified nucleoside - 2' fluoroadenosine phosphorothioate linkage
  modified_base 2: mod_base = OTHER; note = 2' O-methyl modified nucleoside - 2' O-methylguanosine phosphorothioate linkage
  modified_base 3: mod_base = OTHER; note = 2' fluoro-modified nucleoside - 2' fluoroadenosine
  modified_base 4: mod_base = OTHER; note = 2' O-methyl modified nucleoside - 2' O-methyluridine
  modified_base 5: mod_base = OTHER; note = 2' fluoro-modified nucleoside - 2' fluorocytidine
  modified_base 6: mod_base = OTHER; note = 2' O-methyl modified nucleoside - 2' O-methyluridine
  modified_base 7: mod_base = OTHER; note = 2' fluoro-modified nucleoside - 2' fluorocytidine
  modified_base 8: mod_base = OTHER; note = 2' fluoro-modified nucleoside - 2' fluorouridine
  modified_base 9: mod_base = OTHER; note = 2' fluoro-modified nucleoside - 2' fluorouridine
  modified_base 10: mod_base = OTHER; note = 2' O-methyl modified nucleoside - 2' O-methyladenosine
  modified_base 11: mod_base = OTHER; note = 2' fluoro-modified nucleoside - 2' fluorocytidine
  modified_base 12: mod_base = OTHER; note = 2' O-methyl modified nucleoside - 2' O-methyladenosine
  modified_base 13: mod_base = OTHER; note = 2' fluoro-modified nucleoside - 2' fluorocytidine
  modified_base 14: mod_base = OTHER; note = 2' O-methyl modified nucleoside - 2' O-methyluridine
  modified_base 15: mod_base = OTHER; note = 2' fluoro-modified nucleoside - 2' fluorocytidine
  modified_base 16: mod_base = OTHER; note = 2' O-methyl modified nucleoside - 2' O-methylguanosine
  modified_base 17: mod_base = OTHER; note = 2' fluoro-modified nucleoside - 2' fluorouridine
  modified_base 18: mod_base = OTHER; note = 2' O-methyl modified nucleoside - 2' O-methylguanosine
  modified_base 19: mod_base = OTHER; note = 2' fluoro-modified nucleoside - 2' fluoroadenosine phosphorothioate linkage
  modified_base 20: mod_base = OTHER; note = 2' O-methyl modified nucleoside - 2' O-methyluridine phosphorothioate linkage
  modified_base 21: mod_base = OTHER; note = 2' O-methyl modified nucleoside - 2' O-methyluridine
agatctcttacactcgtgatt

SEQ ID NO: 25911 - RNA, 21 nt, synthetic construct
  source 1..21: mol_type = other RNA; note = Description of Artificial Sequence: Synthetic oligonucleotide
  modified_base 1: mod_base = OTHER; note = 2' fluoro-modified nucleoside - 2' fluoroguanosine phosphorothioate linkage
  modified_base 2: mod_base = OTHER; note = 2' O-methyl modified nucleoside - 2' O-methyladenosine phosphorothioate linkage
  modified_base 3: mod_base = OTHER; note = 2' fluoro-modified nucleoside - 2' fluorouridine
  modified_base 4: mod_base = OTHER; note = 2' O-methyl modified nucleoside - 2' O-methylcytidine
  modified_base 5: mod_base = OTHER; note = 2' fluoro-modified nucleoside - 2' fluorouridine
  modified_base 6: mod_base = OTHER; note = 2' O-methyl modified nucleoside - 2' O-methylcytidine
  modified_base 7: mod_base = OTHER; note = 2' fluoro-modified nucleoside - 2' fluorouridine
  modified_base 8: mod_base = OTHER; note = 2' fluoro-modified nucleoside - 2' fluorouridine
  modified_base 9: mod_base = OTHER; note = 2' fluoro-modified nucleoside - 2' fluoroadenosine
  modified_base 10: mod_base = OTHER; note = 2' O-methyl modified nucleoside - 2' O-methylcytidine
  modified_base 11: mod_base = OTHER; note = 2' fluoro-modified nucleoside - 2' fluoroadenosine
  modified_base 12: mod_base = OTHER; note = 2' O-methyl modified nucleoside - 2' O-methylcytidine
  modified_base 13: mod_base = OTHER; note = 2' fluoro-modified nucleoside - 2' fluorouridine
  modified_base 14: mod_base = OTHER; note = 2' O-methyl modified nucleoside - 2' O-methylcytidine
  modified_base 15: mod_base = OTHER; note = 2' fluoro-modified nucleoside - 2' fluoroguanosine
  modified_base 16: mod_base = OTHER; note = 2' O-methyl modified nucleoside - 2' O-methyluridine
  modified_base 17: mod_base = OTHER; note = 2' fluoro-modified nucleoside - 2' fluoroguanosine
  modified_base 18: mod_base = OTHER; note = 2' O-methyl modified nucleoside - 2' O-methylguanosine
  modified_base 19: mod_base = OTHER; note = 2' fluoro-modified nucleoside - 2' fluoroadenosine phosphorothioate linkage
  modified_base 20: mod_base = OTHER; note = 2' O-methyl modified nucleoside - 2' O-methyluridine phosphorothioate linkage
  modified_base 21: mod_base = OTHER; note = 2' O-methyl modified nucleoside - 2' O-methyluridine
gatctcttacactcgtggatt

SEQ ID NO: 25912 - RNA, 21 nt, synthetic construct
  source 1..21: mol_type = other RNA; note = Description of Artificial Sequence: Synthetic oligonucleotide
  modified_base 1: mod_base = OTHER; note = 2' fluoro-modified nucleoside - 2' fluoroadenosine phosphorothioate linkage
  modified_base 2: mod_base = OTHER; note = 2' O-methyl modified nucleoside - 2' O-methyluridine phosphorothioate linkage
  modified_base 3: mod_base = OTHER; note = 2' fluoro-modified nucleoside - 2' fluorocytidine
  modified_base 4: mod_base = OTHER; note = 2' O-methyl modified nucleoside - 2' O-methyluridine
  modified_base 5: mod_base = OTHER; note = 2' fluoro-modified nucleoside - 2' fluorocytidine
  modified_base 6: mod_base = OTHER; note = 2' O-methyl modified nucleoside - 2' O-methyluridine
  modified_base 7: mod_base = OTHER; note = 2' fluoro-modified nucleoside - 2' fluorouridine
  modified_base 8: mod_base = OTHER; note = 2' fluoro-modified nucleoside - 2' fluoroadenosine
  modified_base 9: mod_base = OTHER; note = 2' fluoro-modified nucleoside - 2' fluorocytidine
  modified_base 10: mod_base = OTHER; note = 2' O-methyl modified nucleoside - 2' O-methyladenosine
  modified_base 11: mod_base = OTHER; note = 2' fluoro-modified nucleoside - 2' fluorocytidine
  modified_base 12: mod_base = OTHER; note = 2' O-methyl modified nucleoside - 2' O-methyluridine
  modified_base 13: mod_base = OTHER; note = 2' fluoro-modified nucleoside - 2' fluorocytidine
  modified_base 14: mod_base = OTHER; note = 2' O-methyl modified nucleoside - 2' O-methylguanosine
  modified_base 15: mod_base = OTHER; note = 2' fluoro-modified nucleoside - 2' fluorouridine
  modified_base 16: mod_base = OTHER; note = 2' O-methyl modified nucleoside - 2' O-methylguanosine
  modified_base 17: mod_base = OTHER; note = 2' fluoro-modified nucleoside - 2' fluoroguanosine
  modified_base 18: mod_base = OTHER; note = 2' O-methyl modified nucleoside - 2' O-methyluridine
  modified_base 19: mod_base = OTHER; note = 2' fluoro-modified nucleoside - 2' fluoroadenosine phosphorothioate linkage
  modified_base 20: mod_base = OTHER; note = 2' O-methyl modified nucleoside - 2' O-methyluridine phosphorothioate linkage
  modified_base 21: mod_base = OTHER; note = 2' O-methyl modified nucleoside - 2' O-methyluridine
atctcttacactcgtggtatt

SEQ ID NO: 25913 - RNA, 21 nt, synthetic construct
  source 1..21: mol_type = other RNA; note = Description of Artificial Sequence: Synthetic oligonucleotide
  modified_base 1: mod_base = OTHER; note = 2' fluoro-modified nucleoside - 2' fluorouridine phosphorothioate linkage
  modified_base 2: mod_base = OTHER; note = 2' O-methyl modified nucleoside - 2' O-methylcytidine phosphorothioate linkage
  modified_base 3: mod_base = OTHER; note = 2' fluoro-modified nucleoside - 2' fluorouridine
  modified_base 4: mod_base = OTHER; note = 2' O-methyl modified nucleoside - 2' O-methylcytidine
  modified_base 5: mod_base = OTHER; note = 2' fluoro-modified nucleoside - 2' fluorouridine
  modified_base 6: mod_base = OTHER; note = 2' O-methyl modified nucleoside - 2' O-methyluridine
  modified_base 7: mod_base = OTHER; note = 2' fluoro-modified nucleoside - 2' fluoroadenosine
  modified_base 8: mod_base = OTHER; note = 2' fluoro-modified nucleoside - 2' fluorocytidine
  modified_base 9: mod_base = OTHER; note = 2' fluoro-modified nucleoside - 2' fluoroadenosine
  modified_base 10: mod_base = OTHER; note = 2' O-methyl modified nucleoside - 2' O-methylcytidine
  modified_base 11: mod_base = OTHER; note = 2' fluoro-modified nucleoside - 2' fluorouridine
  modified_base 12: mod_base = OTHER; note = 2' O-methyl modified nucleoside - 2' O-methylcytidine
  modified_base 13: mod_base = OTHER; note = 2' fluoro-modified nucleoside - 2' fluoroguanosine
  modified_base 14: mod_base = OTHER; note = 2' O-methyl modified nucleoside - 2' O-methyluridine
  modified_base 15: mod_base = OTHER; note = 2' fluoro-modified nucleoside - 2' fluoroguanosine
  modified_base 16: mod_base = OTHER; note = 2' O-methyl modified nucleoside - 2' O-methylguanosine
  modified_base 17: mod_base = OTHER; note = 2' fluoro-modified nucleoside - 2' fluorouridine
  modified_base 18: mod_base = OTHER; note = 2' O-methyl modified nucleoside - 2' O-methylguanosine
  modified_base 19: mod_base = OTHER; note = 2' fluoro-modified nucleoside - 2' fluoroadenosine phosphorothioate linkage
  modified_base 20: mod_base = OTHER; note = 2' O-methyl modified nucleoside - 2' O-methyluridine phosphorothioate linkage
  modified_base 21: mod_base = OTHER; note = 2' O-methyl modified nucleoside - 2' O-methyluridine
tctcttacactcgtggtgatt

SEQ ID NO: 25914 - RNA, 21 nt, synthetic construct
  source 1..21: mol_type = other RNA; note = Description of Artificial Sequence: Synthetic oligonucleotide
  modified_base 1: mod_base = OTHER; note = 2' fluoro-modified nucleoside - 2' fluorocytidine phosphorothioate linkage
  modified_base 2: mod_base = OTHER; note = 2' O-methyl modified nucleoside - 2' O-methyluridine phosphorothioate linkage
  modified_base 3: mod_base = OTHER; note = 2' fluoro-modified nucleoside - 2' fluorocytidine
  modified_base 4: mod_base = OTHER; note = 2' O-methyl modified nucleoside - 2' O-methyluridine
  modified_base 5: mod_base = OTHER; note = 2' fluoro-modified nucleoside - 2' fluorouridine
  modified_base 6: mod_base = OTHER; note = 2' O-methyl modified nucleoside - 2' O-methyladenosine
  modified_base 7: mod_base = OTHER; note = 2' fluoro-modified nucleoside - 2' fluorocytidine
  modified_base 8: mod_base = OTHER; note = 2' fluoro-modified nucleoside - 2' fluoroadenosine
  modified_base 9: mod_base = OTHER; note = 2' fluoro-modified nucleoside - 2' fluorocytidine
  modified_base 10: mod_base = OTHER; note = 2' O-methyl modified nucleoside - 2' O-methyluridine
  modified_base 11: mod_base = OTHER; note = 2' fluoro-modified nucleoside - 2' fluorocytidine
  modified_base 12: mod_base = OTHER; note = 2' O-methyl modified nucleoside - 2' O-methylguanosine
  modified_base 13: mod_base = OTHER; note = 2' fluoro-modified nucleoside - 2' fluorouridine
  modified_base 14: mod_base = OTHER; note = 2' O-methyl modified nucleoside - 2' O-methylguanosine
  modified_base 15: mod_base = OTHER; note = 2' fluoro-modified nucleoside - 2' fluoroguanosine
  modified_base 16: mod_base = OTHER; note = 2' O-methyl modified nucleoside - 2' O-methyluridine
  modified_base 17: mod_base = OTHER; note = 2' fluoro-modified nucleoside - 2' fluoroguanosine
  modified_base 18: mod_base = OTHER; note = 2' O-methyl modified nucleoside - 2' O-methylguanosine
  modified_base 19: mod_base = OTHER; note = 2' fluoro-modified nucleoside - 2' fluoroadenosine phosphorothioate linkage
  modified_base 20: mod_base = OTHER; note = 2' O-methyl modified nucleoside - 2' O-methyluridine phosphorothioate linkage
  modified_base 21: mod_base = OTHER; note = 2' O-methyl modified nucleoside - 2' O-methyluridine
ctcttacactcgtggtggatt

SEQ ID NO: 25915 - RNA, 21 nt, synthetic construct
  source 1..21: mol_type = other RNA; note = Description of Artificial Sequence: Synthetic oligonucleotide
  modified_base 1: mod_base = OTHER; note = 2' fluoro-modified nucleoside - 2' fluorouridine phosphorothioate linkage
  modified_base 2: mod_base = OTHER; note = 2' O-methyl modified nucleoside - 2' O-methyladenosine phosphorothioate linkage
  modified_base 3: mod_base = OTHER; note = 2' fluoro-modified nucleoside - 2' fluorocytidine
  modified_base 4: mod_base = OTHER; note = 2' O-methyl modified nucleoside - 2' O-methyladenosine
  modified_base 5: mod_base = OTHER; note = 2' fluoro-modified nucleoside - 2' fluorocytidine
  modified_base 6: mod_base = OTHER; note = 2' O-methyl modified nucleoside - 2' O-methyluridine
  modified_base 7: mod_base = OTHER; note = 2' fluoro-modified nucleoside - 2' fluorocytidine
  modified_base 8: mod_base = OTHER; note = 2' fluoro-modified nucleoside - 2' fluoroguanosine
  modified_base 9: mod_base = OTHER; note = 2' fluoro-modified nucleoside - 2' fluorouridine
  modified_base 10: mod_base = OTHER; note = 2' O-methyl modified nucleoside - 2' O-methylguanosine
  modified_base 11: mod_base = OTHER; note = 2' fluoro-modified nucleoside - 2' fluoroguanosine
  modified_base 12: mod_base = OTHER; note = 2' O-methyl modified nucleoside - 2' O-methyluridine
  modified_base 13: mod_base = OTHER; note = 2' fluoro-modified nucleoside - 2' fluoroguanosine
  modified_base 14: mod_base = OTHER; note = 2' O-methyl modified nucleoside - 2' O-methylguanosine
  modified_base 15: mod_base = OTHER; note = 2' fluoro-modified nucleoside - 2' fluoroguanosine
  modified_base 16: mod_base = OTHER; note = 2' O-methyl modified nucleoside - 2' O-methyladenosine
  modified_base 17: mod_base = OTHER; note = 2' fluoro-modified nucleoside - 2' fluoroadenosine
  modified_base 18: mod_base = OTHER; note = 2' O-methyl modified nucleoside - 2' O-methylguanosine
  modified_base 19: mod_base = OTHER; note = 2' fluoro-modified nucleoside - 2' fluoroadenosine phosphorothioate linkage
  modified_base 20: mod_base = OTHER; note = 2' O-methyl modified nucleoside - 2' O-methyluridine phosphorothioate linkage
  modified_base 21: mod_base = OTHER; note = 2' O-methyl modified nucleoside - 2' O-methyluridine
tacactcgtggtgggaagatt

SEQ ID NO: 25916 - RNA, 21 nt, synthetic construct
  source 1..21: mol_type = other RNA; note = Description of Artificial Sequence: Synthetic oligonucleotide
  modified_base 1: mod_base = OTHER; note = 2' fluoro-modified nucleoside - 2' fluoroadenosine phosphorothioate linkage
  modified_base 2: mod_base = OTHER; note = 2' O-methyl modified nucleoside - 2' O-methylcytidine phosphorothioate linkage
  modified_base 3: mod_base = OTHER; note = 2' fluoro-modified nucleoside - 2' fluoroadenosine
  modified_base 4: mod_base = OTHER; note = 2' O-methyl modified nucleoside - 2' O-methylcytidine
  modified_base 5: mod_base = OTHER; note = 2' fluoro-modified nucleoside - 2' fluorouridine
  modified_base 6: mod_base = OTHER; note = 2' O-methyl modified nucleoside - 2' O-methylcytidine
  modified_base 7: mod_base = OTHER; note = 2' fluoro-modified nucleoside - 2' fluoroguanosine
  modified_base 8: mod_base = OTHER; note = 2' fluoro-modified nucleoside - 2' fluorouridine
  modified_base 9: mod_base = OTHER; note = 2' fluoro-modified nucleoside - 2' fluoroguanosine
  modified_base 10: mod_base = OTHER; note = 2' O-methyl modified nucleoside - 2' O-methylguanosine
  modified_base 11: mod_base = OTHER; note = 2' fluoro-modified nucleoside - 2' fluorouridine
  modified_base 12: mod_base = OTHER; note = 2' O-methyl modified nucleoside - 2' O-methylguanosine
  modified_base 13: mod_base = OTHER; note = 2' fluoro-modified nucleoside - 2' fluoroguanosine
  modified_base 14: mod_base = OTHER; note = 2' O-methyl modified nucleoside - 2' O-methylguanosine
  modified_base 15: mod_base = OTHER; note = 2' fluoro-modified nucleoside - 2' fluoroadenosine
  modified_base 16: mod_base = OTHER; note = 2' O-methyl modified nucleoside - 2' O-methyladenosine
  modified_base 17: mod_base = OTHER; note = 2' fluoro-modified nucleoside - 2' fluoroguanosine
  modified_base 18: mod_base = OTHER; note = 2' O-methyl modified nucleoside - 2' O-methyladenosine
  modified_base 19: mod_base = OTHER; note = 2' fluoro-modified nucleoside - 2' fluoroadenosine phosphorothioate linkage
  modified_base 20: mod_base = OTHER; note = 2' O-methyl modified nucleoside - 2' O-methyluridine phosphorothioate linkage
  modified_base 21: mod_base = OTHER; note = 2' O-methyl modified nucleoside - 2' O-methyluridine
acactcgtggtgggaagaatt

SEQ ID NO: 25917 - RNA, 21 nt, synthetic construct
  source 1..21: mol_type = other RNA; note = Description of Artificial Sequence: Synthetic oligonucleotide
  modified_base 1: mod_base = OTHER; note = 2' fluoro-modified nucleoside - 2' fluoroadenosine phosphorothioate linkage
  modified_base 2: mod_base = OTHER; note = 2' O-methyl modified nucleoside - 2' O-methylcytidine phosphorothioate linkage
  modified_base 3: mod_base = OTHER; note = 2' fluoro-modified nucleoside - 2' fluorouridine
  modified_base 4: mod_base = OTHER; note = 2' O-methyl modified nucleoside - 2' O-methylcytidine
  modified_base 5: mod_base = OTHER; note = 2' fluoro-modified nucleoside - 2' fluoroguanosine
  modified_base 6: mod_base = OTHER; note = 2' O-methyl modified nucleoside - 2' O-methyluridine
  modified_base 7: mod_base = OTHER; note = 2' fluoro-modified nucleoside - 2' fluoroguanosine
  modified_base 8: mod_base = OTHER; note = 2' fluoro-modified nucleoside - 2' fluoroguanosine
  modified_base 9: mod_base = OTHER; note = 2' fluoro-modified nucleoside - 2' fluorouridine
  modified_base 10: mod_base = OTHER; note = 2' O-methyl modified nucleoside - 2' O-methylguanosine
  modified_base 11: mod_base = OTHER; note = 2' fluoro-modified nucleoside - 2' fluoroguanosine
  modified_base 12: mod_base = OTHER; note = 2' O-methyl modified nucleoside - 2' O-methylguanosine
  modified_base 13: mod_base = OTHER; note = 2' fluoro-modified nucleoside - 2' fluoroadenosine
  modified_base 14: mod_base = OTHER; note = 2' O-methyl modified nucleoside - 2' O-methyladenosine
  modified_base 15: mod_base = OTHER; note = 2' fluoro-modified nucleoside - 2' fluoroguanosine
  modified_base 16: mod_base = OTHER; note = 2' O-methyl modified nucleoside - 2' O-methyladenosine
  modified_base 17: mod_base = OTHER; note = 2' fluoro-modified nucleoside - 2' fluoroguanosine
  modified_base 18: mod_base = OTHER; note = 2' O-methyl modified nucleoside - 2' O-methyluridine
  modified_base 19: mod_base = OTHER; note = 2' fluoro-modified nucleoside - 2' fluoroadenosine phosphorothioate linkage
  modified_base 20: mod_base = OTHER; note = 2' O-methyl modified nucleoside - 2' O-methyluridine phosphorothioate linkage
  modified_base 21: mod_base = OTHER; note = 2' O-methyl modified nucleoside - 2' O-methyluridine
actcgtggtgggaagagtatt

SEQ ID NO: 25918 - RNA, 21 nt, synthetic construct
  source 1..21: mol_type = other RNA; note = Description of Artificial Sequence: Synthetic oligonucleotide
  modified_base 1: mod_base = OTHER; note = 2' fluoro-modified nucleoside - 2' fluorocytidine phosphorothioate linkage
  modified_base 2: mod_base = OTHER; note = 2' O-methyl modified nucleoside - 2' O-methylguanosine phosphorothioate linkage
  modified_base 3: mod_base = OTHER; note = 2' fluoro-modified nucleoside - 2' fluorouridine
  modified_base 4: mod_base = OTHER; note = 2' O-methyl modified nucleoside - 2' O-methylguanosine
  modified_base 5: mod_base = OTHER; note = 2' fluoro-modified nucleoside - 2' fluoroguanosine
  modified_base 6: mod_base = OTHER; note = 2' O-methyl modified nucleoside - 2' O-methyluridine
  modified_base 7: mod_base = OTHER; note = 2' fluoro-modified nucleoside - 2' fluoroguanosine
  modified_base 8: mod_base = OTHER; note = 2' fluoro-modified nucleoside - 2' fluoroguanosine
  modified_base 9: mod_base = OTHER; note = 2' fluoro-modified nucleoside - 2' fluoroguanosine
  modified_base 10: mod_base = OTHER; note = 2' O-methyl modified nucleoside - 2' O-methyladenosine
  modified_base 11: mod_base = OTHER; note = 2' fluoro-modified nucleoside - 2' fluoroadenosine
  modified_base 12: mod_base = OTHER; note = 2' O-methyl modified nucleoside - 2' O-methylguanosine
  modified_base 13: mod_base = OTHER; note = 2' fluoro-modified nucleoside - 2' fluoroadenosine
  modified_base 14: mod_base = OTHER; note = 2' O-methyl modified nucleoside - 2' O-methylguanosine
  modified_base 15: mod_base = OTHER; note = 2' fluoro-modified nucleoside - 2' fluorouridine
  modified_base 16: mod_base = OTHER; note = 2' O-methyl modified nucleoside - 2' O-methyluridine
  modified_base 17: mod_base = OTHER; note = 2' fluoro-modified nucleoside - 2' fluorouridine
  modified_base 18: mod_base = OTHER; note = 2' O-methyl modified nucleoside - 2' O-methyladenosine
  modified_base 19: mod_base = OTHER; note = 2' fluoro-modified nucleoside - 2' fluoroadenosine phosphorothioate linkage
  modified_base 20: mod_base = OTHER; note = 2' O-methyl modified nucleoside - 2' O-methyluridine phosphorothioate linkage
  modified_base 21: mod_base = OTHER; note = 2' O-methyl modified nucleoside - 2' O-methyluridine
cgtggtgggaagagtttaatt

SEQ ID NO: 25919 - RNA, 21 nt, synthetic construct
  source 1..21: mol_type = other RNA; note = Description of Artificial Sequence: Synthetic oligonucleotide
  modified_base 1: mod_base = OTHER; note = 2' fluoro-modified nucleoside - 2' fluoroguanosine phosphorothioate linkage
  modified_base 2: mod_base = OTHER; note = 2' O-methyl modified nucleoside - 2' O-methyluridine phosphorothioate linkage
  modified_base 3: mod_base = OTHER; note = 2' fluoro-modified nucleoside - 2' fluoroguanosine
  modified_base 4: mod_base = OTHER; note = 2' O-methyl modified nucleoside - 2' O-methyladenosine
  modified_base 5: mod_base = OTHER; note = 2' fluoro-modified nucleoside - 2' fluoroadenosine
  modified_base 6: mod_base = OTHER; note = 2' O-methyl modified nucleoside - 2' O-methyladenosine
  modified_base 7: mod_base = OTHER; note = 2' fluoro-modified nucleoside - 2' fluorocytidine
  modified_base 8: mod_base = OTHER; note = 2' fluoro-modified nucleoside - 2' fluorouridine
  modified_base 9: mod_base = OTHER; note = 2' fluoro-modified nucleoside - 2' fluoroguanosine
  modified_base 10: mod_base = OTHER; note = 2' O-methyl modified nucleoside - 2' O-methylguanosine
  modified_base 11: mod_base = OTHER; note = 2' fluoro-modified nucleoside - 2' fluoroguanosine
  modified_base 12: mod_base = OTHER; note = 2' O-methyl modified nucleoside - 2' O-methylguanosine
  modified_base 13: mod_base = OTHER; note = 2' fluoro-modified nucleoside - 2' fluorouridine
  modified_base 14: mod_base = OTHER; note = 2' O-methyl modified nucleoside - 2' O-methylguanosine
  modified_base 15: mod_base = OTHER; note = 2' fluoro-modified nucleoside - 2' fluoroguanosine
  modified_base 16: mod_base = OTHER; note = 2' O-methyl modified nucleoside - 2' O-methyladenosine
  modified_base 17: mod_base = OTHER; note = 2' fluoro-modified nucleoside - 2' fluoroadenosine
  modified_base 18: mod_base = OTHER; note = 2' O-methyl modified nucleoside - 2' O-methyluridine
  modified_base 19: mod_base = OTHER; note = 2' fluoro-modified nucleoside - 2' fluoroadenosine phosphorothioate linkage
  modified_base 20: mod_base = OTHER; note = 2' O-methyl modified nucleoside - 2' O-methyluridine phosphorothioate linkage
  modified_base 21: mod_base = OTHER; note = 2' O-methyl modified nucleoside - 2' O-methyluridine
gtgaaactggggtggaatatt

SEQ ID NO: 25920 - RNA, 21 nt, synthetic construct
  source 1..21: mol_type = other RNA; note = Description of Artificial Sequence: Synthetic oligonucleotide
  modified_base 1: mod_base = OTHER; note = 2' fluoro-modified nucleoside - 2' fluorouridine phosphorothioate linkage
  modified_base 2: mod_base = OTHER; note = 2' O-methyl modified nucleoside - 2' O-methylguanosine phosphorothioate linkage
  modified_base 3: mod_base = OTHER; note = 2' fluoro-modified nucleoside - 2' fluoroguanosine
  modified_base 4: mod_base = OTHER; note = 2' O-methyl modified nucleoside - 2' O-methyladenosine
  modified_base 5: mod_base = OTHER; note = 2' fluoro-modified nucleoside - 2' fluoroadenosine
  modified_base 6: mod_base = OTHER; note = 2' O-methyl modified nucleoside - 2' O-methyluridine
  modified_base 7: mod_base = OTHER; note = 2' fluoro-modified nucleoside - 2' fluorouridine
  modified_base 8: mod_base = OTHER; note = 2' fluoro-modified nucleoside - 2' fluoroguanosine
  modified_base 9: mod_base = OTHER; note = 2' fluoro-modified nucleoside - 2' fluoroguanosine
  modified_base 10: mod_base = OTHER; note = 2' O-methyl modified nucleoside - 2' O-methylguanosine
  modified_base 11: mod_base = OTHER; note = 2' fluoro-modified nucleoside - 2' fluorouridine
  modified_base 12: mod_base = OTHER; note = 2' O-methyl modified nucleoside - 2' O-methylguanosine
  modified_base 13: mod_base = OTHER; note = 2' fluoro-modified nucleoside - 2' fluorouridine
  modified_base 14: mod_base = OTHER; note = 2' O-methyl modified nucleoside - 2' O-methylcytidine
  modified_base 15: mod_base = OTHER; note = 2' fluoro-modified nucleoside - 2' fluorocytidine
  modified_base 16: mod_base = OTHER; note = 2' O-methyl modified nucleoside - 2' O-methyladenosine
  modified_base 17: mod_base = OTHER; note = 2' fluoro-modified nucleoside - 2' fluorocytidine
  modified_base 18: mod_base = OTHER; note = 2' O-methyl modified nucleoside - 2' O-methylguanosine
  modified_base 19: mod_base = OTHER; note = 2' fluoro-modified nucleoside - 2' fluoroadenosine phosphorothioate linkage
  modified_base 20: mod_base = OTHER; note = 2' O-methyl modified nucleoside - 2' O-methyluridine phosphorothioate linkage
  modified_base 21: mod_base = OTHER; note = 2' O-methyl modified nucleoside - 2' O-methyluridine
tggaattgggtgtccacgatt

SEQ ID NO: 25921 - RNA, 21 nt, synthetic construct
  source 1..21: mol_type = other RNA; note = Description of Artificial Sequence: Synthetic oligonucleotide
  modified_base 1: mod_base = OTHER; note = 2' fluoro-modified nucleoside - 2' fluoroguanosine phosphorothioate linkage
  modified_base 2: mod_base = OTHER; note = 2' O-methyl modified nucleoside - 2' O-methyladenosine phosphorothioate linkage
  modified_base 3: mod_base = OTHER; note = 2' fluoro-modified nucleoside - 2' fluoroadenosine
  modified_base 4: mod_base = OTHER; note = 2' O-methyl modified nucleoside - 2' O-methyluridine
  modified_base 5: mod_base = OTHER; note = 2' fluoro-modified nucleoside - 2' fluorouridine
  modified_base 6: mod_base = OTHER; note = 2' O-methyl modified nucleoside - 2' O-methylguanosine
  modified_base 7: mod_base = OTHER; note = 2' fluoro-modified nucleoside - 2' fluoroguanosine
  modified_base 8: mod_base = OTHER; note = 2' fluoro-modified nucleoside - 2' fluoroguanosine
  modified_base 9: mod_base = OTHER; note = 2' fluoro-modified nucleoside - 2' fluorouridine
  modified_base 10: mod_base = OTHER; note = 2' O-methyl modified nucleoside - 2' O-methylguanosine
  modified_base 11: mod_base = OTHER; note = 2' fluoro-modified nucleoside - 2' fluorouridine
  modified_base 12: mod_base = OTHER; note = 2' O-methyl modified nucleoside - 2' O-methylcytidine
  modified_base 13: mod_base = OTHER; note = 2' fluoro-modified nucleoside - 2' fluorocytidine
  modified_base 14: mod_base = OTHER; note = 2' O-methyl modified nucleoside - 2' O-methyladenosine
  modified_base 15: mod_base = OTHER; note = 2' fluoro-modified nucleoside - 2' fluorocytidine
  modified_base 16: mod_base = OTHER; note = 2' O-methyl modified nucleoside - 2' O-methylguanosine
  modified_base 17: mod_base = OTHER; note = 2' fluoro-modified nucleoside - 2' fluorouridine
  modified_base 18: mod_base = OTHER; note = 2' O-methyl modified nucleoside - 2' O-methyladenosine
  modified_base 19: mod_base = OTHER; note = 2' fluoro-modified nucleoside - 2' fluoroadenosine phosphorothioate linkage
  modified_base 20: mod_base = OTHER; note = 2' O-methyl modified nucleoside - 2' O-methyluridine phosphorothioate linkage
  modified_base 21: mod_base = OTHER; note = 2' O-methyl modified nucleoside - 2' O-methyluridine
gaattgggtgtccacgtaatt

SEQ ID NO: 25922 - RNA, 21 nt, synthetic construct
  source 1..21: mol_type = other RNA; note = Description of Artificial Sequence: Synthetic oligonucleotide
  modified_base 1: mod_base = OTHER; note = 2' fluoro-modified nucleoside - 2' fluoroadenosine phosphorothioate linkage
  modified_base 2: mod_base = OTHER; note = 2' O-methyl modified nucleoside - 2' O-methyladenosine phosphorothioate linkage
  modified_base 3: mod_base = OTHER; note = 2' fluoro-modified nucleoside - 2' fluorouridine
  modified_base 4: mod_base = OTHER; note = 2' O-methyl modified nucleoside - 2' O-methyluridine
  modified_base 5: mod_base = OTHER; note = 2' fluoro-modified nucleoside - 2' fluoroguanosine
  modified_base 6: mod_base = OTHER; note = 2' O-methyl modified nucleoside - 2' O-methylguanosine
  modified_base 7: mod_base = OTHER; note = 2' fluoro-modified nucleoside - 2' fluoroguanosine
  modified_base 8: mod_base = OTHER; note = 2' fluoro-modified nucleoside - 2' fluorouridine
  modified_base 9: mod_base = OTHER; note = 2' fluoro-modified nucleoside - 2' fluoroguanosine
  modified_base 10: mod_base = OTHER; note = 2' O-methyl modified nucleoside - 2' O-methyluridine
  modified_base 11: mod_base = OTHER; note = 2' fluoro-modified nucleoside - 2' fluorocytidine
  modified_base 12: mod_base = OTHER; note = 2' O-methyl modified nucleoside - 2' O-methylcytidine
  modified_base 13: mod_base = OTHER; note = 2' fluoro-modified nucleoside - 2' fluoroadenosine
  modified_base 14: mod_base = OTHER; note = 2' O-methyl modified nucleoside - 2' O-methylcytidine
  modified_base 15: mod_base = OTHER; note = 2' fluoro-modified nucleoside - 2' fluoroguanosine
  modified_base 16: mod_base = OTHER; note = 2' O-methyl modified nucleoside - 2' O-methyluridine
  modified_base 17: mod_base = OTHER; note = 2' fluoro-modified nucleoside - 2' fluoroadenosine
  modified_base 18: mod_base = OTHER; note = 2' O-methyl modified nucleoside - 2' O-methyluridine
  modified_base 19: mod_base = OTHER; note = 2' fluoro-modified nucleoside - 2' fluoroadenosine phosphorothioate linkage
  modified_base 20: mod_base = OTHER; note = 2' O-methyl modified nucleoside - 2' O-methyluridine phosphorothioate linkage
  modified_base 21: mod_base = OTHER; note = 2' O-methyl modified nucleoside - 2' O-methyluridine
aattgggtgtccacgtatatt

SEQ ID NO: 25923 - RNA, 21 nt, synthetic construct
  source 1..21: mol_type = other RNA; note = Description of Artificial Sequence: Synthetic oligonucleotide
  modified_base 1: mod_base = OTHER; note = 2' fluoro-modified nucleoside - 2' fluoroadenosine phosphorothioate linkage
  modified_base 2: mod_base = OTHER; note = 2' O-methyl modified nucleoside - 2' O-methyluridine phosphorothioate linkage
  modified_base 3: mod_base = OTHER; note = 2' fluoro-modified nucleoside - 2' fluorouridine
  modified_base 4: mod_base = OTHER; note = 2' O-methyl modified nucleoside - 2' O-methylguanosine
  modified_base 5: mod_base = OTHER; note = 2' fluoro-modified nucleoside - 2' fluoroguanosine
  modified_base 6: mod_base = OTHER; note = 2' O-methyl modified nucleoside - 2' O-methylguanosine
  modified_base 7: mod_base = OTHER; note = 2' fluoro-modified nucleoside - 2' fluorouridine
  modified_base 8: mod_base = OTHER; note = 2' fluoro-modified nucleoside - 2' fluoroguanosine
  modified_base 9: mod_base = OTHER; note = 2' fluoro-modified nucleoside - 2' fluorouridine
  modified_base 10: mod_base = OTHER; note = 2' O-methyl modified nucleoside - 2' O-methylcytidine
  modified_base 11: mod_base = OTHER; note = 2' fluoro-modified nucleoside - 2' fluorocytidine
  modified_base 12: mod_base = OTHER; note = 2' O-methyl modified nucleoside - 2' O-methyladenosine
  modified_base 13: mod_base = OTHER; note = 2' fluoro-modified nucleoside - 2' fluorocytidine
  modified_base 14: mod_base = OTHER; note = 2' O-methyl modified nucleoside - 2' O-methylguanosine
  modified_base 15: mod_base = OTHER; note = 2' fluoro-modified nucleoside - 2' fluorouridine
  modified_base 16: mod_base = OTHER; note = 2' O-methyl modified nucleoside - 2' O-methyladenosine
  modified_base 17: mod_base = OTHER; note = 2' fluoro-modified nucleoside - 2' fluorouridine
  modified_base 18: mod_base = OTHER; note = 2' O-methyl modified nucleoside - 2' O-methylguanosine
  modified_base 19: mod_base = OTHER; note = 2' fluoro-modified nucleoside - 2' fluoroadenosine phosphorothioate linkage
  modified_base 20: mod_base = OTHER; note = 2' O-methyl modified nucleoside - 2' O-methyluridine phosphorothioate linkage
  modified_base 21: mod_base = OTHER; note = 2' O-methyl modified nucleoside - 2' O-methyluridine
attgggtgtccacgtatgatt

SEQ ID NO: 25924 - RNA, 21 nt, synthetic construct
  source 1..21: mol_type = other RNA; note = Description of Artificial Sequence: Synthetic oligonucleotide
  modified_base 1: mod_base = OTHER; note = 2' fluoro-modified nucleoside - 2' fluoroguanosine phosphorothioate linkage
  modified_base 2: mod_base = OTHER; note = 2' O-methyl modified nucleoside - 2' O-methylguanosine phosphorothioate linkage
  modified_base 3: mod_base = OTHER; note = 2' fluoro-modified nucleoside - 2' fluoroguanosine
  modified_base 4: mod_base = OTHER; note = 2' O-methyl modified nucleoside - 2' O-methyluridine
  modified_base 5: mod_base = OTHER; note = 2' fluoro-modified nucleoside - 2' fluoroguanosine
  modified_base 6: mod_base = OTHER; note = 2' O-methyl modified nucleoside - 2' O-methyluridine
  modified_base 7: mod_base = OTHER; note = 2' fluoro-modified nucleoside - 2' fluorocytidine
  modified_base 8: mod_base = OTHER; note = 2' fluoro-modified nucleoside - 2' fluorocytidine
  modified_base 9: mod_base = OTHER; note = 2' fluoro-modified nucleoside - 2' fluoroadenosine
  modified_base 10: mod_base = OTHER; note = 2' O-methyl modified nucleoside - 2' O-methylcytidine
  modified_base 11: mod_base = OTHER; note = 2' fluoro-modified nucleoside - 2' fluoroguanosine
  modified_base 12: mod_base = OTHER; note = 2' O-methyl modified nucleoside - 2' O-methyluridine
  modified_base 13: mod_base = OTHER; note = 2' fluoro-modified nucleoside - 2' fluoroadenosine
  modified_base 14: mod_base = OTHER; note = 2' O-methyl modified nucleoside - 2' O-methyluridine
  modified_base 15: mod_base = OTHER; note = 2' fluoro-modified nucleoside - 2' fluoroguanosine
  modified_base 16: mod_base = OTHER; note = 2' O-methyl modified nucleoside - 2' O-methyluridine
  modified_base 17: mod_base = OTHER; note = 2' fluoro-modified nucleoside - 2' fluorouridine
  modified_base 18: mod_base = OTHER; note = 2' O-methyl modified nucleoside - 2' O-methylcytidine
  modified_base 19: mod_base = OTHER; note = 2' fluoro-modified nucleoside - 2' fluoroadenosine phosphorothioate linkage
  modified_base 20: mod_base = OTHER; note = 2' O-methyl modified nucleoside - 2' O-methyluridine phosphorothioate linkage
  modified_base 21: mod_base = OTHER; note = 2' O-methyl modified nucleoside - 2' O-methyluridine
gggtgtccacgtatgttcatt

SEQ ID NO: 25925 - RNA, 21 nt, synthetic construct
  source 1..21: mol_type = other RNA; note = Description of Artificial Sequence: Synthetic oligonucleotide
  modified_base 1: mod_base = OTHER; note = 2' fluoro-modified nucleoside - 2' fluoroguanosine phosphorothioate linkage
  modified_base 2: mod_base = OTHER; note = 2' O-methyl modified nucleoside - 2' O-methylguanosine phosphorothioate linkage
  modified_base 3: mod_base = OTHER; note = 2' fluoro-modified nucleoside - 2' fluorouridine
  modified_base 4: mod_base = OTHER; note = 2' O-methyl modified nucleoside - 2' O-methylguanosine
  modified_base 5: mod_base = OTHER; note = 2' fluoro-modified nucleoside - 2' fluorouridine
  modified_base 6: mod_base = OTHER; note = 2' O-methyl modified nucleoside - 2' O-methylcytidine
  modified_base 7: mod_base = OTHER; note = 2' fluoro-modified nucleoside - 2' fluorocytidine
  modified_base 8: mod_base = OTHER; note = 2' fluoro-modified nucleoside - 2' fluoroadenosine
  modified_base 9: mod_base = OTHER; note = 2' fluoro-modified nucleoside - 2' fluorocytidine
  modified_base 10: mod_base = OTHER; note = 2' O-methyl modified nucleoside - 2' O-methylguanosine
  modified_base 11: mod_base = OTHER; note = 2' fluoro-modified nucleoside - 2' fluorouridine
  modified_base 12: mod_base = OTHER; note = 2' O-methyl modified nucleoside - 2' O-methyladenosine
  modified_base 13: mod_base = OTHER; note = 2' fluoro-modified nucleoside - 2' fluorouridine
  modified_base 14: mod_base = OTHER; note = 2' O-methyl modified nucleoside - 2' O-methylguanosine
  modified_base 15: mod_base = OTHER; note = 2' fluoro-modified nucleoside - 2' fluorouridine
  modified_base 16: mod_base = OTHER; note = 2' O-methyl modified nucleoside - 2' O-methyluridine
  modified_base 17: mod_base = OTHER; note = 2' fluoro-modified nucleoside - 2' fluorocytidine
  modified_base 18: mod_base = OTHER; note = 2' O-methyl modified nucleoside - 2' O-methylcytidine
  modified_base 19: mod_base = OTHER; note = 2' fluoro-modified nucleoside - 2' fluoroadenosine phosphorothioate linkage
  modified_base 20: mod_base = OTHER; note = 2' O-methyl modified nucleoside - 2' O-methyluridine phosphorothioate linkage
  modified_base 21: mod_base = OTHER; note = 2' O-methyl modified nucleoside - 2' O-methyluridine
ggtgtccacgtatgttccatt

SEQ ID NO: 25926 - RNA, 21 nt, synthetic construct
  source 1..21: mol_type = other RNA; note = Description of Artificial Sequence: Synthetic oligonucleotide
  modified_base 1: mod_base = OTHER; note = 2' fluoro-modified nucleoside - 2' fluorocytidine phosphorothioate linkage
  modified_base 2: mod_base = OTHER; note = 2' O-methyl modified nucleoside - 2' O-methylcytidine phosphorothioate linkage
  modified_base 3: mod_base = OTHER; note = 2' fluoro-modified nucleoside - 2' fluoroadenosine
  modified_base 4: mod_base = OTHER; note = 2' O-methyl modified nucleoside - 2' O-methylcytidine
  modified_base 5: mod_base = OTHER; note = 2' fluoro-modified nucleoside - 2' fluoroguanosine
  modified_base 6: mod_base = OTHER; note = 2' O-methyl modified nucleoside - 2' O-methyluridine
  modified_base 7: mod_base = OTHER; note = 2' fluoro-modified nucleoside - 2' fluoroadenosine
  modified_base 8: mod_base = OTHER; note = 2' fluoro-modified nucleoside - 2' fluorouridine
  modified_base 9: mod_base = OTHER; note = 2' fluoro-modified nucleoside - 2' fluoroguanosine
  modified_base 10: mod_base = OTHER; note = 2' O-methyl modified nucleoside - 2' O-methyluridine
  modified_base 11: mod_base = OTHER; note = 2' fluoro-modified nucleoside - 2' fluorouridine
  modified_base 12: mod_base = OTHER; note = 2' O-methyl modified nucleoside - 2' O-methylcytidine
  modified_base 13: mod_base = OTHER; note = 2' fluoro-modified nucleoside - 2' fluorocytidine
  modified_base 14: mod_base = OTHER; note = 2' O-methyl modified nucleoside - 2' O-methylcytidine
  modified_base 15: mod_base = OTHER; note = 2' fluoro-modified nucleoside - 2' fluorouridine
  modified_base 16: mod_base = OTHER; note = 2' O-methyl modified nucleoside - 2' O-methyluridine
  modified_base 17: mod_base = OTHER; note = 2' fluoro-modified nucleoside - 2' fluorouridine
  modified_base 18: mod_base = OTHER; note = 2' O-methyl modified nucleoside - 2' O-methyluridine
  modified_base 19: mod_base = OTHER; note = 2' fluoro-modified nucleoside - 2' fluoroadenosine phosphorothioate linkage
  modified_base 20: mod_base = OTHER; note = 2' O-methyl modified nucleoside - 2' O-methyluridine phosphorothioate linkage
  modified_base 21: mod_base = OTHER; note = 2' O-methyl modified nucleoside - 2' O-methyluridine
ccacgtatgttcccttttatt

SEQ ID NO: 25927 - RNA, 21 nt, synthetic construct
  source 1..21: mol_type = other RNA; note = Description of Artificial Sequence: Synthetic oligonucleotide
  modified_base 1: mod_base = OTHER; note = 2' fluoro-modified nucleoside - 2' fluorocytidine phosphorothioate linkage
  modified_base 2: mod_base = OTHER; note = 2' O-methyl modified nucleoside - 2' O-methyladenosine phosphorothioate linkage
  modified_base 3: mod_base = OTHER; note = 2' fluoro-modified nucleoside - 2' fluorocytidine
  modified_base 4: mod_base = OTHER; note = 2' O-methyl modified nucleoside - 2' O-methylguanosine
  modified_base 5: mod_base = OTHER; note = 2' fluoro-modified nucleoside - 2' fluorouridine
  modified_base 6: mod_base = OTHER; note = 2' O-methyl modified nucleoside - 2' O-methyladenosine
  modified_base 7: mod_base = OTHER; note = 2' fluoro-modified nucleoside - 2' fluorouridine
  modified_base 8: mod_base = OTHER; note = 2' fluoro-modified nucleoside - 2' fluoroguanosine
  modified_base 9: mod_base = OTHER; note = 2' fluoro-modified nucleoside - 2' fluorouridine
  modified_base 10: mod_base = OTHER; note = 2' O-methyl modified nucleoside - 2' O-methyluridine
  modified_base 11: mod_base = OTHER; note = 2' fluoro-modified nucleoside - 2' fluorocytidine
  modified_base 12: mod_base = OTHER; note = 2' O-methyl modified nucleoside - 2' O-methylcytidine
  modified_base 13: mod_base = OTHER; note = 2' fluoro-modified nucleoside - 2' fluorocytidine
  modified_base 14: mod_base = OTHER; note = 2' O-methyl modified nucleoside - 2' O-methyluridine
  modified_base 15: mod_base = OTHER; note = 2' fluoro-modified nucleoside - 2' fluorouridine
  modified_base 16: mod_base = OTHER; note = 2' O-methyl modified nucleoside - 2' O-methyluridine
  modified_base 17: mod_base = OTHER; note = 2' fluoro-modified nucleoside - 2' fluorouridine
  modified_base 18: mod_base = OTHER; note = 2' O-methyl modified nucleoside - 2' O-methylguanosine
  modified_base 19: mod_base = OTHER; note = 2' fluoro-modified nucleoside - 2' fluoroadenosine phosphorothioate linkage
  modified_base 20: mod_base = OTHER; note = 2' O-methyl modified nucleoside - 2' O-methyluridine phosphorothioate linkage
  modified_base 21: mod_base = OTHER; note = 2' O-methyl modified nucleoside - 2' O-methyluridine
cacgtatgttcccttttgatt

SEQ ID NO: 25928 - RNA, 21 nt, synthetic construct
  source 1..21: mol_type = other RNA; note = Description of Artificial Sequence: Synthetic oligonucleotide
  modified_base 1: mod_base = OTHER; note = 2' fluoro-modified nucleoside - 2' fluoroguanosine phosphorothioate linkage
  modified_base 2: mod_base = OTHER; note = 2' O-methyl modified nucleoside - 2' O-methyluridine phosphorothioate linkage
  modified_base 3: mod_base = OTHER; note = 2' fluoro-modified nucleoside - 2' fluoroadenosine
  modified_base 4: mod_base = OTHER; note = 2' O-methyl modified nucleoside - 2' O-methyluridine
  modified_base 5: mod_base = OTHER; note = 2' fluoro-modified nucleoside - 2' fluoroguanosine
  modified_base 6: mod_base = OTHER; note = 2' O-methyl modified nucleoside - 2' O-methyluridine
  modified_base 7: mod_base = OTHER; note = 2' fluoro-modified nucleoside - 2' fluorouridine
  modified_base 8: mod_base = OTHER; note = 2' fluoro-modified nucleoside - 2' fluorocytidine
  modified_base 9: mod_base = OTHER; note = 2' fluoro-modified nucleoside - 2' fluorocytidine
  modified_base 10: mod_base = OTHER; note = 2' O-methyl modified nucleoside - 2' O-methylcytidine
  modified_base 11: mod_base = OTHER; note = 2' fluoro-modified nucleoside - 2' fluorouridine
  modified_base 12: mod_base = OTHER; note = 2' O-methyl modified nucleoside - 2' O-methyluridine
  modified_base 13: mod_base = OTHER; note = 2' fluoro-modified nucleoside - 2' fluorouridine
  modified_base 14: mod_base = OTHER; note = 2' O-methyl modified nucleoside - 2' O-methyluridine
  modified_base 15: mod_base = OTHER; note = 2' fluoro-modified nucleoside - 2' fluoroguanosine
  modified_base 16: mod_base = OTHER; note = 2' O-methyl modified nucleoside - 2' O-methylcytidine
  modified_base 17: mod_base = OTHER; note = 2' fluoro-modified nucleoside - 2' fluorocytidine
  modified_base 18: mod_base = OTHER; note = 2' O-methyl modified nucleoside - 2' O-methyluridine
  modified_base 19: mod_base = OTHER; note = 2' fluoro-modified nucleoside - 2' fluoroadenosine phosphorothioate linkage
  modified_base 20: mod_base = OTHER; note = 2' O-methyl modified nucleoside - 2' O-methyluridine phosphorothioate linkage
  modified_base 21: mod_base = OTHER; note = 2' O-methyl modified nucleoside - 2' O-methyluridine
gtatgttcccttttgcctatt

SEQ ID NO: 25929 - RNA, 21 nt, synthetic construct
  source 1..21: mol_type = other RNA; note = Description of Artificial Sequence: Synthetic oligonucleotide
  modified_base 1: mod_base = OTHER; note = 2' fluoro-modified nucleoside - 2' fluorouridine phosphorothioate linkage
  modified_base 2: mod_base = OTHER; note = 2' O-methyl modified nucleoside - 2' O-methylguanosine phosphorothioate linkage
  modified_base 3: mod_base = OTHER; note = 2' fluoro-modified nucleoside - 2' fluorouridine
  modified_base 4: mod_base = OTHER; note = 2' O-methyl modified nucleoside - 2' O-methyluridine
  modified_base 5: mod_base = OTHER; note = 2' fluoro-modified nucleoside - 2' fluorocytidine
  modified_base 6: mod_base = OTHER; note = 2' O-methyl modified nucleoside - 2' O-methylcytidine
  modified_base 7: mod_base = OTHER; note = 2' fluoro-modified nucleoside - 2' fluorocytidine
  modified_base 8: mod_base = OTHER; note = 2' fluoro-modified nucleoside - 2' fluorouridine
  modified_base 9: mod_base = OTHER; note = 2' fluoro-modified nucleoside - 2' fluorouridine
  modified_base 10: mod_base = OTHER; note = 2' O-methyl modified nucleoside - 2' O-methyluridine
  modified_base 11: mod_base = OTHER; note = 2' fluoro-modified nucleoside - 2' fluorouridine
  modified_base 12: mod_base = OTHER; note = 2' O-methyl modified nucleoside - 2' O-methylguanosine
  modified_base 13: mod_base = OTHER; note = 2' fluoro-modified nucleoside - 2' fluorocytidine
  modified_base 14: mod_base = OTHER; note = 2' O-methyl modified nucleoside - 2' O-methylcytidine
  modified_base 15: mod_base = OTHER; note = 2' fluoro-modified nucleoside - 2' fluorouridine
  modified_base 16: mod_base = OTHER; note = 2' O-methyl modified nucleoside - 2' O-methyluridine
  modified_base 17: mod_base = OTHER; note = 2' fluoro-modified nucleoside - 2' fluoroadenosine
  modified_base 18: mod_base = OTHER; note = 2' O-methyl modified nucleoside - 2' O-methylcytidine
  modified_base 19: mod_base = OTHER; note = 2' fluoro-modified nucleoside - 2' fluoroadenosine phosphorothioate linkage
  modified_base 20: mod_base = OTHER; note = 2' O-methyl modified nucleoside - 2' O-methyluridine phosphorothioate linkage
  modified_base 21: mod_base = OTHER; note = 2' O-methyl modified nucleoside - 2' O-methyluridine
tgttcccttttgccttacatt

SEQ ID NO: 25930 - RNA, 21 nt, synthetic construct
  source 1..21: mol_type = other RNA; note = Description of Artificial Sequence: Synthetic oligonucleotide
  modified_base 1: mod_base = OTHER; note = 2' fluoro-modified nucleoside - 2' fluorouridine phosphorothioate linkage
  modified_base 2: mod_base = OTHER; note = 2' O-methyl modified nucleoside - 2' O-methylcytidine phosphorothioate linkage
  modified_base 3: mod_base = OTHER; note = 2' fluoro-modified nucleoside - 2' fluorocytidine
  modified_base 4: mod_base = OTHER; note = 2' O-methyl modified nucleoside - 2' O-methylcytidine
  modified_base 5: mod_base = OTHER; note = 2' fluoro-modified nucleoside - 2' fluorouridine
  modified_base 6: mod_base = OTHER; note = 2' O-methyl modified nucleoside - 2' O-methyluridine
  modified_base 7: mod_base = OTHER; note = 2' fluoro-modified nucleoside - 2' fluorouridine
  modified_base 8: mod_base = OTHER; note = 2' fluoro-modified nucleoside - 2' fluorouridine
  modified_base 9: mod_base = OTHER; note = 2' fluoro-modified nucleoside - 2' fluoroguanosine
  modified_base 10: mod_base = OTHER; note = 2' O-methyl modified nucleoside - 2' O-methylcytidine
  modified_base 11: mod_base = OTHER; note = 2' fluoro-modified nucleoside - 2' fluorocytidine
  modified_base 12: mod_base = OTHER; note = 2' O-methyl modified nucleoside - 2' O-methyluridine
  modified_base 13: mod_base = OTHER; note = 2' fluoro-modified nucleoside - 2' fluorouridine
  modified_base 14: mod_base = OTHER; note = 2' O-methyl modified nucleoside - 2' O-methyladenosine
  modified_base 15: mod_base = OTHER; note = 2' fluoro-modified nucleoside - 2' fluorocytidine
  modified_base 16: mod_base = OTHER; note = 2' O-methyl modified nucleoside - 2' O-methyluridine
  modified_base 17: mod_base = OTHER; note = 2' fluoro-modified nucleoside - 2' fluoroadenosine
  modified_base 18: mod_base = OTHER; note = 2' O-methyl modified nucleoside - 2' O-methyluridine
  modified_base 19: mod_base = OTHER; note = 2' fluoro-modified nucleoside - 2' fluoroadenosine phosphorothioate linkage
  modified_base 20: mod_base = OTHER; note = 2' O-methyl modified nucleoside - 2' O-methyluridine phosphorothioate linkage
  modified_base 21: mod_base = OTHER; note = 2' O-methyl modified nucleoside - 2' O-methyluridine
tcccttttgccttactatatt

SEQ ID NO: 25931 - RNA, 21 nt, synthetic construct
  source 1..21: mol_type = other RNA; note = Description of Artificial Sequence: Synthetic oligonucleotide
  modified_base 1: mod_base = OTHER; note = 2' fluoro-modified nucleoside - 2' fluorouridine phosphorothioate linkage
  modified_base 2: mod_base = OTHER; note = 2' O-methyl modified nucleoside - 2' O-methyluridine phosphorothioate linkage
  modified_base 3: mod_base = OTHER; note = 2' fluoro-modified nucleoside - 2' fluoroguanosine
  modified_base 4: mod_base = OTHER; note = 2' O-methyl modified nucleoside - 2' O-methylcytidine
  modified_base 5: mod_base = OTHER; note = 2' fluoro-modified nucleoside - 2' fluorocytidine
  modified_base 6: mod_base = OTHER; note = 2' O-methyl modified nucleoside - 2' O-methyluridine
  modified_base 7: mod_base = OTHER; note = 2' fluoro-modified nucleoside - 2' fluorouridine
  modified_base 8: mod_base = OTHER; note = 2' fluoro-modified nucleoside - 2' fluoroadenosine
  modified_base 9: mod_base = OTHER; note = 2' fluoro-modified nucleoside - 2' fluorocytidine
  modified_base 10: mod_base = OTHER; note = 2' O-methyl modified nucleoside - 2' O-methyluridine
  modified_base 11: mod_base = OTHER; note = 2' fluoro-modified nucleoside - 2' fluoroadenosine
  modified_base 12: mod_base = OTHER; note = 2' O-methyl modified nucleoside - 2' O-methyluridine
  modified_base 13: mod_base = OTHER; note = 2' fluoro-modified nucleoside - 2' fluoroadenosine
  modified_base 14: mod_base = OTHER; note = 2' O-methyl modified nucleoside - 2' O-methyluridine
  modified_base 15: mod_base = OTHER; note = 2' fluoro-modified nucleoside - 2' fluoroguanosine
  modified_base 16: mod_base = OTHER; note = 2' O-methyl modified nucleoside - 2' O-methyluridine
  modified_base 17: mod_base = OTHER; note = 2' fluoro-modified nucleoside - 2' fluorouridine
  modified_base 18: mod_base = OTHER; note = 2' O-methyl modified nucleoside - 2' O-methylcytidine
  modified_base 19: mod_base = OTHER; note = 2' fluoro-modified nucleoside - 2' fluoroadenosine phosphorothioate linkage
  modified_base 20: mod_base = OTHER; note = 2' O-methyl modified nucleoside - 2' O-methyluridine phosphorothioate linkage
  modified_base 21: mod_base = OTHER; note = 2' O-methyl modified nucleoside - 2' O-methyluridine
ttgccttactatatgttcatt

SEQ ID NO: 25932 - RNA, 21 nt, synthetic construct
  source 1..21: mol_type = other RNA; note = Description of Artificial Sequence: Synthetic oligonucleotide
  modified_base 1: mod_base = OTHER; note = 2' fluoro-modified nucleoside - 2' fluorocytidine phosphorothioate linkage
  modified_base 2: mod_base = OTHER; note = 2' O-methyl modified nucleoside - 2' O-methyluridine phosphorothioate linkage
  modified_base 3: mod_base = OTHER; note = 2' fluoro-modified nucleoside - 2' fluorouridine
  modified_base 4: mod_base = OTHER; note = 2' O-methyl modified nucleoside - 2' O-methyladenosine
  modified_base 5: mod_base = OTHER; note = 2' fluoro-modified nucleoside - 2' fluorocytidine
  modified_base 6: mod_base = OTHER; note = 2' O-methyl modified nucleoside - 2' O-methyluridine
  modified_base 7: mod_base = OTHER; note = 2' fluoro-modified nucleoside - 2' fluoroadenosine
  modified_base 8: mod_base = OTHER; note = 2' fluoro-modified nucleoside - 2' fluorouridine
  modified_base 9: mod_base = OTHER; note = 2' fluoro-modified nucleoside - 2' fluoroadenosine
  modified_base 10: mod_base = OTHER; note = 2' O-methyl modified nucleoside - 2' O-methyluridine
  modified_base 11: mod_base = OTHER; note = 2' fluoro-modified nucleoside - 2' fluoroguanosine
  modified_base 12: mod_base = OTHER; note = 2' O-methyl modified nucleoside - 2' O-methyluridine
  modified_base 13: mod_base = OTHER; note = 2' fluoro-modified nucleoside - 2' fluorouridine
  modified_base 14: mod_base = OTHER; note = 2' O-methyl modified nucleoside - 2' O-methylcytidine
  modified_base 15: mod_base = OTHER; note = 2' fluoro-modified nucleoside - 2' fluorouridine
  modified_base 16: mod_base = OTHER; note = 2' O-methyl modified nucleoside - 2' O-methylguanosine
  modified_base 17: mod_base = OTHER; note = 2' fluoro-modified nucleoside - 2' fluorouridine
  modified_base 18: mod_base = OTHER; note = 2' O-methyl modified nucleoside - 2' O-methylcytidine
  modified_base 19: mod_base = OTHER; note = 2' fluoro-modified nucleoside - 2' fluoroadenosine phosphorothioate linkage
  modified_base 20: mod_base = OTHER; note = 2' O-methyl modified nucleoside - 2' O-methyluridine phosphorothioate linkage
  modified_base 21: mod_base = OTHER; note = 2' O-methyl modified nucleoside - 2' O-methyluridine
cttactatatgttctgtcatt

SEQ ID NO: 25933 - RNA, 21 nt, synthetic construct
  source 1..21: mol_type = other RNA; note = Description of Artificial Sequence: Synthetic oligonucleotide
  modified_base 1: mod_base = OTHER; note = 2' fluoro-modified nucleoside - 2' fluorouridine phosphorothioate linkage
  modified_base 2: mod_base = OTHER; note = 2' O-methyl modified nucleoside - 2' O-methyluridine phosphorothioate linkage
  modified_base 3: mod_base = OTHER; note = 2' fluoro-modified nucleoside - 2' fluoroadenosine
  modified_base 4: mod_base = OTHER; note = 2' O-methyl modified nucleoside - 2' O-methylcytidine
  modified_base 5: mod_base = OTHER; note = 2' fluoro-modified nucleoside - 2' fluorouridine
  modified_base 6: mod_base = OTHER; note = 2' O-methyl modified nucleoside - 2' O-methyladenosine
  modified_base 7: mod_base = OTHER; note = 2' fluoro-modified nucleoside - 2' fluorouridine
  modified_base 8: mod_base = OTHER; note = 2' fluoro-modified nucleoside - 2' fluoroadenosine
  modified_base 9: mod_base = OTHER; note = 2' fluoro-modified nucleoside - 2' fluorouridine
  modified_base 10: mod_base = OTHER; note = 2' O-methyl modified nucleoside - 2' O-methylguanosine
  modified_base 11: mod_base = OTHER; note = 2' fluoro-modified nucleoside - 2' fluorouridine
  modified_base 12: mod_base = OTHER; note = 2' O-methyl modified nucleoside - 2' O-methyluridine
  modified_base 13: mod_base = OTHER; note = 2' fluoro-modified nucleoside - 2' fluorocytidine
  modified_base 14: mod_base = OTHER; note = 2' O-methyl modified nucleoside - 2' O-methyluridine
  modified_base 15: mod_base = OTHER; note = 2' fluoro-modified nucleoside - 2' fluoroguanosine
  modified_base 16: mod_base = OTHER; note = 2' O-methyl modified nucleoside - 2' O-methyluridine
  modified_base 17: mod_base = OTHER; note = 2' fluoro-modified nucleoside - 2' fluorocytidine
  modified_base 18: mod_base = OTHER; note = 2' O-methyl modified nucleoside - 2' O-methyladenosine
  modified_base 19: mod_base = OTHER; note = 2' fluoro-modified nucleoside - 2' fluoroadenosine phosphorothioate linkage
  modified_base 20: mod_base = OTHER; note = 2' O-methyl modified nucleoside - 2' O-methyluridine phosphorothioate linkage
  modified_base 21: mod_base = OTHER; note = 2' O-methyl modified nucleoside - 2' O-methyluridine
ttactatatgttctgtcaatt

SEQ ID NO: 25934 - RNA, 21 nt, synthetic construct
  source 1..21: mol_type = other RNA; note = Description of Artificial Sequence: Synthetic oligonucleotide
  modified_base 1: mod_base = OTHER; note = 2' fluoro-modified nucleoside - 2' fluorouridine phosphorothioate linkage
  modified_base 2: mod_base = OTHER; note = 2' O-methyl modified nucleoside - 2' O-methyluridine phosphorothioate linkage
  modified_base 3: mod_base = OTHER; note = 2' fluoro-modified nucleoside - 2' fluorocytidine
  modified_base 4: mod_base = OTHER; note = 2' O-methyl modified nucleoside - 2' O-methyladenosine
  modified_base 5: mod_base = OTHER; note = 2' fluoro-modified nucleoside - 2' fluorouridine
  modified_base 6: mod_base = OTHER; note = 2' O-methyl modified nucleoside - 2' O-methylcytidine
  modified_base 7: mod_base = OTHER; note = 2' fluoro-modified nucleoside - 2' fluorouridine
  modified_base 8: mod_base = OTHER; note = 2' fluoro-modified nucleoside - 2' fluorouridine
  modified_base 9: mod_base = OTHER; note = 2' fluoro-modified nucleoside - 2' fluoroadenosine
  modified_base 10: mod_base = OTHER; note = 2' O-methyl modified nucleoside - 2' O-methylcytidine
  modified_base 11: mod_base = OTHER; note = 2' fluoro-modified nucleoside - 2' fluoroadenosine
  modified_base 12: mod_base = OTHER; note = 2' O-methyl modified nucleoside - 2' O-methyladenosine
  modified_base 13: mod_base = OTHER; note = 2' fluoro-modified nucleoside - 2' fluorocytidine
  modified_base 14: mod_base = OTHER; note = 2' O-methyl modified nucleoside - 2' O-methyluridine
  modified_base 15: mod_base = OTHER; note = 2' fluoro-modified nucleoside - 2' fluorouridine
  modified_base 16: mod_base = OTHER; note = 2' O-methyl modified nucleoside - 2' O-methylguanosine
  modified_base 17: mod_base = OTHER; note = 2' fluoro-modified nucleoside - 2' fluorouridine
  modified_base 18: mod_base = OTHER; note = 2' O-methyl modified nucleoside - 2' O-methyladenosine
  modified_base 19: mod_base = OTHER; note = 2' fluoro-modified nucleoside - 2' fluoroadenosine phosphorothioate linkage
  modified_base 20: mod_base = OTHER; note = 2' O-methyl modified nucleoside - 2' O-methyluridine phosphorothioate linkage
  modified_base 21: mod_base = OTHER; note = 2' O-methyl modified nucleoside - 2' O-methyluridine
ttcatcttacaacttgtaatt

SEQ ID NO: 25935 - RNA, 21 nt, synthetic construct
  source 1..21: mol_type = other RNA; note = Description of Artificial Sequence: Synthetic oligonucleotide
  modified_base 1: mod_base = OTHER; note = 2' fluoro-modified nucleoside - 2' fluoroadenosine phosphorothioate linkage
  modified_base 2: mod_base = OTHER; note = 2' O-methyl modified nucleoside - 2' O-methyladenosine phosphorothioate linkage
  modified_base 3: mod_base = OTHER; note = 2' fluoro-modified nucleoside - 2' fluorocytidine
  modified_base 4: mod_base = OTHER; note = 2' O-methyl modified nucleoside - 2' O-methyluridine
  modified_base 5: mod_base = OTHER; note = 2' fluoro-modified nucleoside - 2' fluorouridine
  modified_base 6: mod_base = OTHER; note = 2' O-methyl modified nucleoside - 2' O-methylguanosine
  modified_base 7: mod_base = OTHER; note = 2' fluoro-modified nucleoside - 2' fluorouridine
  modified_base 8: mod_base = OTHER; note = 2' fluoro-modified nucleoside - 2' fluoroadenosine
  modified_base 9: mod_base = OTHER; note = 2' fluoro-modified nucleoside - 2' fluoroguanosine
  modified_base 10: mod_base = OTHER; note = 2' O-methyl modified nucleoside - 2' O-methylguanosine
  modified_base 11: mod_base = OTHER; note = 2' fluoro-modified nucleoside - 2' fluoroguanosine
  modified_base 12: mod_base = OTHER; note = 2' O-methyl modified nucleoside - 2' O-methylcytidine
  modified_base 13: mod_base = OTHER; note = 2' fluoro-modified nucleoside - 2' fluorouridine
  modified_base 14: mod_base = OTHER; note = 2' O-methyl modified nucleoside - 2' O-methylguanosine
  modified_base 15: mod_base = OTHER; note = 2' fluoro-modified nucleoside - 2' fluoroguanosine
  modified_base 16: mod_base = OTHER; note = 2' O-methyl modified nucleoside - 2' O-methyluridine
  modified_base 17: mod_base = OTHER; note = 2' fluoro-modified nucleoside - 2' fluoroguanosine
  modified_base 18: mod_base = OTHER; note = 2' O-methyl modified nucleoside - 2' O-methyluridine
  modified_base 19: mod_base = OTHER; note = 2' fluoro-modified nucleoside - 2' fluoroadenosine phosphorothioate linkage
  modified_base 20: mod_base = OTHER; note = 2' O-methyl modified nucleoside - 2' O-methyluridine phosphorothioate linkage
  modified_base 21: mod_base = OTHER; note = 2' O-methyl modified nucleoside - 2' O-methyluridine
aacttgtagggctggtgtatt

SEQ ID NO: 25936 - RNA, 21 nt, synthetic construct
  source 1..21: mol_type = other RNA; note = Description of Artificial Sequence: Synthetic oligonucleotide
  modified_base 1: mod_base = OTHER; note = 2' fluoro-modified nucleoside - 2' fluorouridine phosphorothioate linkage
  modified_base 2: mod_base = OTHER; note = 2' O-methyl modified nucleoside - 2' O-methylguanosine phosphorothioate linkage
  modified_base 3: mod_base = OTHER; note = 2' fluoro-modified nucleoside - 2' fluorouridine
  modified_base 4: mod_base = OTHER; note = 2' O-methyl modified nucleoside - 2' O-methyladenosine
  modified_base 5: mod_base = OTHER; note = 2' fluoro-modified nucleoside - 2' fluoroguanosine
  modified_base 6: mod_base = OTHER; note = 2' O-methyl modified nucleoside - 2' O-methylguanosine
  modified_base 7: mod_base = OTHER; note = 2' fluoro-modified nucleoside - 2' fluoroguanosine
  modified_base 8: mod_base = OTHER; note = 2' fluoro-modified nucleoside - 2' fluorocytidine
  modified_base 9: mod_base = OTHER; note = 2' fluoro-modified nucleoside - 2' fluorouridine
  modified_base 10: mod_base = OTHER; note = 2' O-methyl modified nucleoside - 2' O-methylguanosine
  modified_base 11: mod_base = OTHER; note = 2' fluoro-modified nucleoside - 2' fluoroguanosine
  modified_base 12: mod_base = OTHER; note = 2' O-methyl modified nucleoside - 2' O-methyluridine
  modified_base 13: mod_base = OTHER; note = 2' fluoro-modified nucleoside - 2' fluoroguanosine
  modified_base 14: mod_base = OTHER; note = 2' O-methyl modified nucleoside - 2' O-methyluridine
  modified_base 15: mod_base = OTHER; note = 2' fluoro-modified nucleoside - 2' fluorouridine
  modified_base 16: mod_base = OTHER; note = 2' O-methyl modified nucleoside - 2' O-methyladenosine
  modified_base 17: mod_base = OTHER; note = 2' fluoro-modified nucleoside - 2' fluoroadenosine
  modified_base 18: mod_base = OTHER; note = 2' O-methyl modified nucleoside - 2' O-methylcytidine
  modified_base 19: mod_base = OTHER; note = 2' fluoro-modified nucleoside - 2' fluoroadenosine phosphorothioate linkage
  modified_base 20: mod_base = OTHER; note = 2' O-methyl modified nucleoside - 2' O-methyluridine phosphorothioate linkage
  modified_base 21: mod_base = OTHER; note = 2' O-methyl modified nucleoside - 2' O-methyluridine
tgtagggctggtgttaacatt

SEQ ID NO: 25937 - RNA, 21 nt, synthetic construct
  source 1..21: mol_type = other RNA; note = Description of Artificial Sequence: Synthetic oligonucleotide
  modified_base 1: mod_base = OTHER; note = 2' fluoro-modified nucleoside - 2' fluoroguanosine phosphorothioate linkage
  modified_base 2: mod_base = OTHER; note = 2' O-methyl modified nucleoside - 2' O-methylcytidine phosphorothioate linkage
  modified_base 3: mod_base = OTHER; note = 2' fluoro-modified nucleoside - 2' fluorouridine
  modified_base 4: mod_base = OTHER; note = 2' O-methyl modified nucleoside - 2' O-methylguanosine
  modified_base 5: mod_base = OTHER; note = 2' fluoro-modified nucleoside - 2' fluoroguanosine
  modified_base 6: mod_base = OTHER; note = 2' O-methyl modified nucleoside - 2' O-methyluridine
  modified_base 7: mod_base = OTHER; note = 2' fluoro-modified nucleoside - 2' fluoroguanosine
  modified_base 8: mod_base = OTHER; note = 2' fluoro-modified nucleoside - 2' fluorouridine
  modified_base 9: mod_base = OTHER; note = 2' fluoro-modified nucleoside - 2' fluorouridine
  modified_base 10: mod_base = OTHER; note = 2' O-methyl modified nucleoside - 2' O-methyladenosine
  modified_base 11: mod_base = OTHER; note = 2' fluoro-modified nucleoside - 2' fluoroadenosine
  modified_base 12: mod_base = OTHER; note = 2' O-methyl modified nucleoside - 2' O-methylcytidine
  modified_base 13: mod_base = OTHER; note = 2' fluoro-modified nucleoside - 2' fluorouridine
  modified_base 14: mod_base = OTHER; note = 2' O-methyl modified nucleoside - 2' O-methyluridine
  modified_base 15: mod_base = OTHER; note = 2' fluoro-modified nucleoside - 2' fluoroadenosine
  modified_base 16: mod_base = OTHER; note = 2' O-methyl modified nucleoside - 2' O-methylcytidine
  modified_base 17: mod_base = OTHER; note = 2' fluoro-modified nucleoside - 2' fluoroguanosine
  modified_base 18: mod_base = OTHER; note = 2' O-methyl modified nucleoside - 2' O-methyladenosine
  modified_base 19: mod_base = OTHER; note = 2' fluoro-modified nucleoside - 2' fluoroadenosine phosphorothioate linkage
  modified_base 20: mod_base = OTHER; note = 2' O-methyl modified nucleoside - 2' O-methyluridine phosphorothioate linkage
  modified_base 21: mod_base = OTHER; note = 2' O-methyl modified nucleoside - 2' O-methyluridine
gctggtgttaacttacgaatt

SEQ ID NO: 25938 - RNA, 21 nt, synthetic construct
  source 1..21: mol_type = other RNA; note = Description of Artificial Sequence: Synthetic oligonucleotide
  modified_base 1: mod_base = OTHER; note = 2' fluoro-modified nucleoside - 2' fluorouridine phosphorothioate linkage
  modified_base 2: mod_base = OTHER; note = 2' O-methyl modified nucleoside - 2' O-methylguanosine phosphorothioate linkage
  modified_base 3: mod_base = OTHER; note = 2' fluoro-modified nucleoside - 2' fluoroguanosine
  modified_base 4: mod_base = OTHER; note = 2' O-methyl modified nucleoside - 2' O-methyluridine
  modified_base 5: mod_base = OTHER; note = 2' fluoro-modified nucleoside - 2' fluoroguanosine
  modified_base 6: mod_base = OTHER; note = 2' O-methyl modified nucleoside - 2' O-methyluridine
  modified_base 7: mod_base = OTHER; note = 2' fluoro-modified nucleoside - 2' fluorouridine
  modified_base 8: mod_base = OTHER; note = 2' fluoro-modified nucleoside - 2' fluoroadenosine
  modified_base 9: mod_base = OTHER; note = 2' fluoro-modified nucleoside - 2' fluoroadenosine
  modified_base 10: mod_base = OTHER; note = 2' O-methyl modified nucleoside - 2' O-methylcytidine
  modified_base 11: mod_base = OTHER; note = 2' fluoro-modified nucleoside - 2' fluorouridine
  modified_base 12: mod_base = OTHER; note = 2' O-methyl modified nucleoside - 2' O-methyluridine
  modified_base 13: mod_base = OTHER; note = 2' fluoro-modified nucleoside - 2' fluoroadenosine
  modified_base 14: mod_base = OTHER; note = 2' O-methyl modified nucleoside - 2' O-methylcytidine
  modified_base 15: mod_base = OTHER; note = 2' fluoro-modified nucleoside - 2' fluoroguanosine
  modified_base 16: mod_base = OTHER; note = 2' O-methyl modified nucleoside - 2' O-methyladenosine
  modified_base 17: mod_base = OTHER; note = 2' fluoro-modified nucleoside - 2' fluorocytidine
  modified_base 18: mod_base = OTHER; note = 2' O-methyl modified nucleoside - 2' O-methyluridine
  modified_base 19: mod_base = OTHER; note = 2' fluoro-modified nucleoside - 2' fluoroadenosine phosphorothioate linkage
  modified_base 20: mod_base = OTHER; note = 2' O-methyl modified nucleoside - 2' O-methyluridine phosphorothioate linkage
  modified_base 21: mod_base = OTHER; note = 2' O-methyl modified nucleoside - 2' O-methyluridine
tggtgttaacttacgactatt

SEQ ID NO: 25939 - RNA, 21 nt, synthetic construct
  source 1..21: mol_type = other RNA; note = Description of Artificial Sequence: Synthetic oligonucleotide
  modified_base 1: mod_base = OTHER; note = 2' fluoro-modified nucleoside - 2' fluoroguanosine phosphorothioate linkage
  modified_base 2: mod_base = OTHER; note = 2' O-methyl modified nucleoside - 2' O-methylguanosine phosphorothioate linkage
  modified_base 3: mod_base = OTHER; note = 2' fluoro-modified nucleoside - 2' fluorouridine
  modified_base 4: mod_base = OTHER; note = 2' O-methyl modified nucleoside - 2' O-methylguanosine
  modified_base 5: mod_base = OTHER; note = 2' fluoro-modified nucleoside - 2' fluorouridine
  modified_base 6: mod_base = OTHER; note = 2' O-methyl modified nucleoside - 2' O-methyluridine
  modified_base 7: mod_base = OTHER; note = 2' fluoro-modified nucleoside - 2' fluoroadenosine
  modified_base 8: mod_base = OTHER; note = 2' fluoro-modified nucleoside - 2' fluoroadenosine
  modified_base 9: mod_base = OTHER; note = 2' fluoro-modified nucleoside - 2' fluorocytidine
  modified_base 10: mod_base = OTHER; note = 2' O-methyl modified nucleoside - 2' O-methyluridine
  modified_base 11: mod_base = OTHER; note = 2' fluoro-modified nucleoside - 2' fluorouridine
  modified_base 12: mod_base = OTHER; note = 2' O-methyl modified nucleoside - 2' O-methyladenosine
  modified_base 13: mod_base = OTHER; note = 2' fluoro-modified nucleoside - 2' fluorocytidine
  modified_base 14: mod_base = OTHER; note = 2' O-methyl modified nucleoside - 2' O-methylguanosine
  modified_base 15: mod_base = OTHER; note = 2' fluoro-modified nucleoside - 2' fluoroadenosine
  modified_base 16: mod_base = OTHER; note = 2' O-methyl modified nucleoside - 2' O-methylcytidine
  modified_base 17: mod_base = OTHER; note = 2' fluoro-modified nucleoside - 2' fluorouridine
  modified_base 18: mod_base = OTHER; note = 2' O-methyl modified nucleoside - 2' O-methyluridine
  modified_base 19: mod_base = OTHER; note = 2' fluoro-modified nucleoside - 2' fluoroadenosine phosphorothioate linkage
  modified_base 20: mod_base = OTHER; note = 2' O-methyl modified nucleoside - 2' O-methyluridine phosphorothioate linkage
  modified_base 21: mod_base = OTHER; note = 2' O-methyl modified nucleoside - 2' O-methyluridine
ggtgttaacttacgacttatt

SEQ ID NO: 25940 - RNA, 21 nt, synthetic construct
  source 1..21: mol_type = other RNA; note = Description of Artificial Sequence: Synthetic oligonucleotide
  modified_base 1: mod_base = OTHER; note = 2' fluoro-modified nucleoside - 2' fluoroguanosine phosphorothioate linkage
  modified_base 2: mod_base = OTHER; note = 2' O-methyl modified nucleoside - 2' O-methyluridine phosphorothioate linkage
  modified_base 3: mod_base = OTHER; note = 2' fluoro-modified nucleoside - 2' fluoroguanosine
  modified_base 4: mod_base = OTHER; note = 2' O-methyl modified nucleoside - 2' O-methyluridine
  modified_base 5: mod_base = OTHER; note = 2' fluoro-modified nucleoside - 2' fluorouridine
  modified_base 6: mod_base = OTHER; note = 2' O-methyl modified nucleoside - 2' O-methyladenosine
  modified_base 7: mod_base = OTHER; note = 2' fluoro-modified nucleoside - 2' fluoroadenosine
  modified_base 8: mod_base = OTHER; note = 2' fluoro-modified nucleoside - 2' fluorocytidine
  modified_base 9: mod_base = OTHER; note = 2' fluoro-modified nucleoside - 2' fluorouridine
  modified_base 10: mod_base = OTHER; note = 2' O-methyl modified nucleoside - 2' O-methyluridine
  modified_base 11: mod_base = OTHER; note = 2' fluoro-modified nucleoside - 2' fluoroadenosine
  modified_base 12: mod_base = OTHER; note = 2' O-methyl modified nucleoside - 2' O-methylcytidine
  modified_base 13: mod_base = OTHER; note = 2' fluoro-modified nucleoside - 2' fluoroguanosine
  modified_base 14: mod_base = OTHER; note = 2' O-methyl modified nucleoside - 2' O-methyladenosine
  modified_base 15: mod_base = OTHER; note = 2' fluoro-modified nucleoside - 2' fluorocytidine
  modified_base 16: mod_base = OTHER; note = 2' O-methyl modified nucleoside - 2' O-methyluridine
  modified_base 17: mod_base = OTHER; note = 2' fluoro-modified nucleoside - 2' fluorouridine
  modified_base 18: mod_base = OTHER; note = 2' O-methyl modified nucleoside - 2' O-methylcytidine
  modified_base 19: mod_base = OTHER; note = 2' fluoro-modified nucleoside - 2' fluoroadenosine phosphorothioate linkage
  modified_base 20: mod_base = OTHER; note = 2' O-methyl modified nucleoside - 2' O-methyluridine phosphorothioate linkage
  modified_base 21: mod_base = OTHER; note = 2' O-methyl modified nucleoside - 2' O-methyluridine
gtgttaacttacgacttcatt

SEQ ID NO: 25941 - RNA, 21 nt, synthetic construct
  source 1..21: mol_type = other RNA; note = Description of Artificial Sequence: Synthetic oligonucleotide
  modified_base 1: mod_base = OTHER; note = 2' fluoro-modified nucleoside - 2' fluoroguanosine phosphorothioate linkage
  modified_base 2: mod_base = OTHER; note = 2' O-methyl modified nucleoside - 2' O-methyluridine phosphorothioate linkage
  modified_base 3: mod_base = OTHER; note = 2' fluoro-modified nucleoside - 2' fluorouridine
  modified_base 4: mod_base = OTHER; note = 2' O-methyl modified nucleoside - 2' O-methyladenosine
  modified_base 5: mod_base = OTHER; note = 2' fluoro-modified nucleoside - 2' fluoroadenosine
  modified_base 6: mod_base = OTHER; note = 2' O-methyl modified nucleoside - 2' O-methylcytidine
  modified_base 7: mod_base = OTHER; note = 2' fluoro-modified nucleoside - 2' fluorouridine
  modified_base 8: mod_base = OTHER; note = 2' fluoro-modified nucleoside - 2' fluorouridine
  modified_base 9: mod_base = OTHER; note = 2' fluoro-modified nucleoside - 2' fluoroadenosine
  modified_base 10: mod_base = OTHER; note = 2' O-methyl modified nucleoside - 2' O-methylcytidine
  modified_base 11: mod_base = OTHER; note = 2' fluoro-modified nucleoside - 2' fluoroguanosine
  modified_base 12: mod_base = OTHER; note = 2' O-methyl modified nucleoside - 2' O-methyladenosine
  modified_base 13: mod_base = OTHER; note = 2' fluoro-modified nucleoside - 2' fluorocytidine
  modified_base 14: mod_base = OTHER; note = 2' O-methyl modified nucleoside - 2' O-methyluridine
  modified_base 15: mod_base = OTHER; note = 2' fluoro-modified nucleoside - 2' fluorouridine
  modified_base 16: mod_base = OTHER; note = 2' O-methyl modified nucleoside - 2' O-methylcytidine
  modified_base 17: mod_base = OTHER; note = 2' fluoro-modified nucleoside - 2' fluoroadenosine
  modified_base 18: mod_base = OTHER; note = 2' O-methyl modified nucleoside - 2' O-methylcytidine
  modified_base 19: mod_base = OTHER; note = 2' fluoro-modified nucleoside - 2' fluoroadenosine phosphorothioate linkage
  modified_base 20: mod_base = OTHER; note = 2' O-methyl modified nucleoside - 2' O-methyluridine phosphorothioate linkage
  modified_base 21: mod_base = OTHER; note = 2' O-methyl modified nucleoside - 2' O-methyluridine
gttaacttacgacttcacatt

SEQ ID NO: 25942 - RNA, 21 nt, synthetic construct
  source 1..21: mol_type = other RNA; note = Description of Artificial Sequence: Synthetic oligonucleotide
  modified_base 1: mod_base = OTHER; note = 2' fluoro-modified nucleoside - 2' fluorouridine phosphorothioate linkage
  modified_base 2: mod_base = OTHER; note = 2' O-methyl modified nucleoside - 2' O-methyluridine phosphorothioate linkage
  modified_base 3: mod_base = OTHER; note = 2' fluoro-modified nucleoside - 2' fluoroadenosine
  modified_base 4: mod_base = OTHER; note = 2' O-methyl modified nucleoside - 2' O-methyladenosine
  modified_base 5: mod_base = OTHER; note = 2' fluoro-modified nucleoside - 2' fluorocytidine
  modified_base 6: mod_base = OTHER; note = 2' O-methyl modified nucleoside - 2' O-methyluridine
  modified_base 7: mod_base = OTHER; note = 2' fluoro-modified nucleoside - 2' fluorouridine
  modified_base 8: mod_base = OTHER; note = 2' fluoro-modified nucleoside - 2' fluoroadenosine
  modified_base 9: mod_base = OTHER; note = 2' fluoro-modified nucleoside - 2' fluorocytidine
  modified_base 10: mod_base = OTHER; note = 2' O-methyl modified nucleoside - 2' O-methylguanosine
  modified_base 11: mod_base = OTHER; note = 2' fluoro-modified nucleoside - 2' fluoroadenosine
  modified_base 12: mod_base = OTHER; note = 2' O-methyl modified nucleoside - 2' O-methylcytidine
  modified_base 13: mod_base = OTHER; note = 2' fluoro-modified nucleoside - 2' fluorouridine
  modified_base 14: mod_base = OTHER; note = 2' O-methyl modified nucleoside - 2' O-methyluridine
  modified_base 15: mod_base = OTHER; note = 2' fluoro-modified nucleoside - 2' fluorocytidine
  modified_base 16: mod_base = OTHER; note = 2' O-methyl modified nucleoside - 2' O-methyladenosine
  modified_base 17: mod_base = OTHER; note = 2' fluoro-modified nucleoside - 2' fluorocytidine
  modified_base 18: mod_base = OTHER; note = 2' O-methyl modified nucleoside - 2' O-methyluridine
  modified_base 19: mod_base = OTHER; note = 2' fluoro-modified nucleoside - 2' fluoroadenosine phosphorothioate linkage
  modified_base 20: mod_base = OTHER; note = 2' O-methyl modified nucleoside - 2' O-methyluridine phosphorothioate linkage
  modified_base 21: mod_base = OTHER; note = 2' O-methyl modified nucleoside - 2' O-methyluridine
ttaacttacgacttcactatt

SEQ ID NO: 25943 - RNA, 21 nt, synthetic construct
  source 1..21: mol_type = other RNA; note = Description of Artificial Sequence: Synthetic oligonucleotide
  modified_base 1: mod_base = OTHER; note = 2' fluoro-modified nucleoside - 2' fluoroadenosine phosphorothioate linkage
  modified_base 2: mod_base = OTHER; note = 2' O-methyl modified nucleoside - 2' O-methylcytidine phosphorothioate linkage
  modified_base 3: mod_base = OTHER; note = 2' fluoro-modified nucleoside - 2' fluorouridine
  modified_base 4: mod_base = OTHER; note = 2' O-methyl modified nucleoside - 2' O-methyluridine
  modified_base 5: mod_base = OTHER; note = 2' fluoro-modified nucleoside - 2' fluoroadenosine
  modified_base 6: mod_base = OTHER; note = 2' O-methyl modified nucleoside - 2' O-methylcytidine
  modified_base 7: mod_base = OTHER; note = 2' fluoro-modified nucleoside - 2' fluoroguanosine
  modified_base 8: mod_base = OTHER; note = 2' fluoro-modified nucleoside - 2' fluoroadenosine
  modified_base 9: mod_base = OTHER; note = 2' fluoro-modified nucleoside - 2' fluorocytidine
  modified_base 10: mod_base = OTHER; note = 2' O-methyl modified nucleoside - 2' O-methyluridine
  modified_base 11: mod_base = OTHER; note = 2' fluoro-modified nucleoside - 2' fluorouridine
  modified_base 12: mod_base = OTHER; note = 2' O-methyl modified nucleoside - 2' O-methylcytidine
  modified_base 13: mod_base = OTHER; note = 2' fluoro-modified nucleoside - 2' fluoroadenosine
  modified_base 14: mod_base = OTHER; note = 2' O-methyl modified nucleoside - 2' O-methylcytidine
  modified_base 15: mod_base = OTHER; note = 2' fluoro-modified nucleoside - 2' fluorouridine
  modified_base 16: mod_base = OTHER; note = 2' O-methyl modified nucleoside - 2' O-methyladenosine
  modified_base 17: mod_base = OTHER; note = 2' fluoro-modified nucleoside - 2' fluoroadenosine
  modified_base 18: mod_base = OTHER; note = 2' O-methyl modified nucleoside - 2' O-methylcytidine
  modified_base 19: mod_base = OTHER; note = 2' fluoro-modified nucleoside - 2' fluoroadenosine phosphorothioate linkage
  modified_base 20: mod_base = OTHER; note = 2' O-methyl modified nucleoside - 2' O-methyluridine phosphorothioate linkage
  modified_base 21: mod_base = OTHER; note = 2' O-methyl modified nucleoside - 2' O-methyluridine
acttacgacttcactaacatt

SEQ ID NO: 25944 - RNA, 21 nt, synthetic construct
  source 1..21: mol_type = other RNA; note = Description of Artificial Sequence: Synthetic oligonucleotide
  modified_base 1: mod_base = OTHER; note = 2' fluoro-modified nucleoside - 2' fluorocytidine phosphorothioate linkage
  modified_base 2: mod_base = OTHER; note = 2' O-methyl modified nucleoside - 2' O-methyluridine phosphorothioate linkage
  modified_base 3: mod_base = OTHER; note = 2' fluoro-modified nucleoside - 2' fluorouridine
  modified_base 4: mod_base = OTHER; note = 2' O-methyl modified nucleoside - 2' O-methyladenosine
  modified_base 5: mod_base = OTHER; note = 2' fluoro-modified nucleoside - 2' fluorocytidine
  modified_base 6: mod_base = OTHER; note = 2' O-methyl modified nucleoside - 2' O-methylguanosine
  modified_base 7: mod_base = OTHER; note = 2' fluoro-modified nucleoside - 2' fluoroadenosine
  modified_base 8: mod_base = OTHER; note = 2' fluoro-modified nucleoside - 2' fluorocytidine
  modified_base 9: mod_base = OTHER; note = 2' fluoro-modified nucleoside - 2' fluorouridine
  modified_base 10: mod_base = OTHER; note = 2' O-methyl modified nucleoside - 2' O-methyluridine
  modified_base 11: mod_base = OTHER; note = 2' fluoro-modified nucleoside - 2' fluorocytidine
  modified_base 12: mod_base = OTHER; note = 2' O-methyl modified nucleoside - 2' O-methyladenosine
  modified_base 13: mod_base = OTHER; note = 2' fluoro-modified nucleoside - 2' fluorocytidine
  modified_base 14: mod_base = OTHER; note = 2' O-methyl modified nucleoside - 2' O-methyluridine
  modified_base 15: mod_base = OTHER; note = 2' fluoro-modified nucleoside - 2' fluoroadenosine
  modified_base 16: mod_base = OTHER; note = 2' O-methyl modified nucleoside - 2' O-methyladenosine
  modified_base 17: mod_base = OTHER; note = 2' fluoro-modified nucleoside - 2' fluorocytidine
  modified_base 18: mod_base = OTHER; note = 2' O-methyl modified nucleoside - 2' O-methyluridine
  modified_base 19: mod_base = OTHER; note = 2' fluoro-modified nucleoside - 2' fluoroadenosine phosphorothioate linkage
  modified_base 20: mod_base = OTHER; note = 2' O-methyl modified nucleoside - 2' O-methyluridine phosphorothioate linkage
  modified_base 21: mod_base = OTHER; note = 2' O-methyl modified nucleoside - 2' O-methyluridine
cttacgacttcactaactatt

SEQ ID NO: 25945 - RNA, 21 nt, synthetic construct
  source 1..21: mol_type = other RNA; note = Description of Artificial Sequence: Synthetic oligonucleotide
  modified_base 1: mod_base = OTHER; note = 2' fluoro-modified nucleoside - 2' fluorouridine phosphorothioate linkage
  modified_base 2: mod_base = OTHER; note = 2' O-methyl modified nucleoside - 2' O-methyladenosine phosphorothioate linkage
  modified_base 3: mod_base = OTHER; note = 2' fluoro-modified nucleoside - 2' fluorocytidine
  modified_base 4: mod_base = OTHER; note = 2' O-methyl modified nucleoside - 2' O-methylguanosine
  modified_base 5: mod_base = OTHER; note = 2' fluoro-modified nucleoside - 2' fluoroadenosine
  modified_base 6: mod_base = OTHER; note = 2' O-methyl modified nucleoside - 2' O-methylcytidine
  modified_base 7: mod_base = OTHER; note = 2' fluoro-modified nucleoside - 2' fluorouridine
  modified_base 8: mod_base = OTHER; note = 2' fluoro-modified nucleoside - 2' fluorouridine
  modified_base 9: mod_base = OTHER; note = 2' fluoro-modified nucleoside - 2' fluorocytidine
  modified_base 10: mod_base = OTHER; note = 2' O-methyl modified nucleoside - 2' O-methyladenosine
  modified_base 11: mod_base = OTHER; note = 2' fluoro-modified nucleoside - 2' fluorocytidine
  modified_base 12: mod_base = OTHER; note = 2' O-methyl modified nucleoside - 2' O-methyluridine
  modified_base 13: mod_base = OTHER; note = 2' fluoro-modified nucleoside - 2' fluoroadenosine
  modified_base 14: mod_base = OTHER; note = 2' O-methyl modified nucleoside - 2' O-methyladenosine
  modified_base 15: mod_base = OTHER; note = 2' fluoro-modified nucleoside - 2' fluorocytidine
  modified_base 16: mod_base = OTHER; note = 2' O-methyl modified nucleoside - 2' O-methyluridine
  modified_base 17: mod_base = OTHER; note = 2' fluoro-modified nucleoside - 2' fluoroguanosine
  modified_base 18: mod_base = OTHER; note = 2' O-methyl modified nucleoside - 2' O-methyluridine
  modified_base 19: mod_base = OTHER; note = 2' fluoro-modified nucleoside - 2' fluoroadenosine phosphorothioate linkage
  modified_base 20: mod_base = OTHER; note = 2' O-methyl modified nucleoside - 2' O-methyluridine phosphorothioate linkage
  modified_base 21: mod_base = OTHER; note = 2' O-methyl modified nucleoside - 2' O-methyluridine
tacgacttcactaactgtatt

SEQ ID NO: 25946 - RNA, 21 nt, synthetic construct
  source 1..21: mol_type = other RNA; note = Description of Artificial Sequence: Synthetic oligonucleotide
  modified_base 1: mod_base = OTHER; note = 2' fluoro-modified nucleoside - 2' fluoroadenosine phosphorothioate linkage
  modified_base 2: mod_base = OTHER; note = 2' O-methyl modified nucleoside - 2' O-methyladenosine phosphorothioate linkage
  modified_base 3: mod_base = OTHER; note = 2' fluoro-modified nucleoside - 2' fluoroadenosine
  modified_base 4: mod_base = OTHER; note = 2' O-methyl modified nucleoside - 2' O-methylguanosine
  modified_base 5: mod_base = OTHER; note = 2' fluoro-modified nucleoside - 2' fluorocytidine
  modified_base 6: mod_base = OTHER; note = 2' O-methyl modified nucleoside - 2' O-methyladenosine
  modified_base 7: mod_base = OTHER; note = 2' fluoro-modified nucleoside - 2' fluoroguanosine
  modified_base 8: mod_base = OTHER; note = 2' fluoro-modified nucleoside - 2' fluorocytidine
  modified_base 9: mod_base = OTHER; note = 2' fluoro-modified nucleoside - 2' fluorocytidine
  modified_base 10: mod_base = OTHER; note = 2' O-methyl modified nucleoside - 2' O-methyluridine
  modified_base 11: mod_base = OTHER; note = 2' fluoro-modified nucleoside - 2' fluoroadenosine
  modified_base 12: mod_base = OTHER; note = 2' O-methyl modified nucleoside - 2' O-methyluridine
  modified_base 13: mod_base = OTHER; note = 2' fluoro-modified nucleoside - 2' fluorocytidine
  modified_base 14: mod_base = OTHER; note = 2' O-methyl modified nucleoside - 2' O-methyluridine
  modified_base 15: mod_base = OTHER; note = 2' fluoro-modified nucleoside - 2' fluorocytidine
  modified_base 16: mod_base = OTHER; note = 2' O-methyl modified nucleoside - 2' O-methyladenosine
  modified_base 17: mod_base = OTHER; note = 2' fluoro-modified nucleoside - 2' fluoroguanosine
  modified_base 18: mod_base = OTHER; note = 2' O-methyl modified nucleoside - 2' O-methyluridine
  modified_base 19: mod_base = OTHER; note = 2' fluoro-modified nucleoside - 2' fluoroadenosine phosphorothioate linkage
  modified_base 20: mod_base = OTHER; note = 2' O-methyl modified nucleoside - 2' O-methyluridine phosphorothioate linkage
  modified_base 21: mod_base = OTHER; note = 2' O-methyl modified nucleoside - 2' O-methyluridine
aaagcagcctatctcagtatt

SEQ ID NO: 25947 - RNA, 21 nt, synthetic construct
  source 1..21: mol_type = other RNA; note = Description of Artificial Sequence: Synthetic oligonucleotide
  modified_base 1: mod_base = OTHER; note = 2' fluoro-modified nucleoside - 2' fluoroadenosine phosphorothioate linkage
  modified_base 2: mod_base = OTHER; note = 2' O-methyl modified nucleoside - 2' O-methylguanosine phosphorothioate linkage
  modified_base 3: mod_base = OTHER; note = 2' fluoro-modified nucleoside - 2' fluorocytidine
  modified_base 4: mod_base = OTHER; note = 2' O-methyl modified nucleoside - 2' O-methylcytidine
  modified_base 5: mod_base = OTHER; note = 2' fluoro-modified nucleoside - 2' fluorouridine
  modified_base 6: mod_base = OTHER; note = 2' O-methyl modified nucleoside - 2' O-methyladenosine
  modified_base 7: mod_base = OTHER; note = 2' fluoro-modified nucleoside - 2' fluorouridine
  modified_base 8: mod_base = OTHER; note = 2' fluoro-modified nucleoside - 2' fluorocytidine
  modified_base 9: mod_base = OTHER; note = 2' fluoro-modified nucleoside - 2' fluorouridine
  modified_base 10: mod_base = OTHER; note = 2' O-methyl modified nucleoside - 2' O-methylcytidine
  modified_base 11: mod_base = OTHER; note = 2' fluoro-modified nucleoside - 2' fluoroadenosine
  modified_base 12: mod_base = OTHER; note = 2' O-methyl modified nucleoside - 2' O-methylguanosine
  modified_base 13: mod_base = OTHER; note = 2' fluoro-modified nucleoside - 2' fluorouridine
  modified_base 14: mod_base = OTHER; note = 2' O-methyl modified nucleoside - 2' O-methyladenosine
  modified_base 15: mod_base = OTHER; note = 2' fluoro-modified nucleoside - 2' fluorocytidine
  modified_base 16: mod_base = OTHER; note = 2' O-methyl modified nucleoside - 2' O-methyluridine
  modified_base 17: mod_base = OTHER; note = 2' fluoro-modified nucleoside - 2' fluoroadenosine
  modified_base 18: mod_base = OTHER; note = 2' O-methyl modified nucleoside - 2' O-methyluridine
  modified_base 19: mod_base = OTHER; note = 2' fluoro-modified nucleoside - 2' fluoroadenosine phosphorothioate linkage
  modified_base 20: mod_base = OTHER; note = 2' O-methyl modified nucleoside - 2' O-methyluridine phosphorothioate linkage
  modified_base 21: mod_base = OTHER; note = 2' O-methyl modified nucleoside - 2' O-methyluridine
agcctatctcagtactatatt

SEQ ID NO: 25948 - RNA, 21 nt, synthetic construct
  source 1..21: mol_type = other RNA; note = Description of Artificial Sequence: Synthetic oligonucleotide
  modified_base 1: mod_base = OTHER; note = 2' fluoro-modified nucleoside - 2' fluoroguanosine phosphorothioate linkage
  modified_base 2: mod_base = OTHER; note = 2' O-methyl modified nucleoside - 2' O-methylcytidine phosphorothioate linkage
  modified_base 3: mod_base = OTHER; note = 2' fluoro-modified nucleoside - 2' fluorocytidine
  modified_base 4: mod_base = OTHER; note = 2' O-methyl modified nucleoside - 2' O-methyluridine
  modified_base 5: mod_base = OTHER; note = 2' fluoro-modified nucleoside - 2' fluoroadenosine
  modified_base 6: mod_base = OTHER; note = 2' O-methyl modified nucleoside - 2' O-methyluridine
  modified_base 7: mod_base = OTHER; note = 2' fluoro-modified nucleoside - 2' fluorocytidine
  modified_base 8: mod_base = OTHER; note = 2' fluoro-modified nucleoside - 2' fluorouridine
  modified_base 9: mod_base = OTHER; note = 2' fluoro-modified nucleoside - 2' fluorocytidine
  modified_base 10: mod_base = OTHER; note = 2' O-methyl modified nucleoside - 2' O-methyladenosine
  modified_base 11: mod_base = OTHER; note = 2' fluoro-modified nucleoside - 2' fluoroguanosine
  modified_base 12: mod_base = OTHER; note = 2' O-methyl modified nucleoside - 2' O-methyluridine
  modified_base 13: mod_base = OTHER; note = 2' fluoro-modified nucleoside - 2' fluoroadenosine
  modified_base 14: mod_base = OTHER; note = 2' O-methyl modified nucleoside - 2' O-methylcytidine
  modified_base 15: mod_base = OTHER; note = 2' fluoro-modified nucleoside - 2' fluorouridine
  modified_base 16: mod_base = OTHER; note = 2' O-methyl modified nucleoside - 2' O-methyladenosine
  modified_base 17: mod_base = OTHER; note = 2' fluoro-modified nucleoside - 2' fluorouridine
  modified_base 18: mod_base = OTHER; note = 2' O-methyl modified nucleoside - 2' O-methyluridine
  modified_base 19: mod_base = OTHER; note = 2' fluoro-modified nucleoside - 2' fluoroadenosine phosphorothioate linkage
  modified_base 20: mod_base = OTHER; note = 2' O-methyl modified nucleoside - 2' O-methyluridine phosphorothioate linkage
  modified_base 21: mod_base = OTHER; note = 2' O-methyl modified nucleoside - 2' O-methyluridine
gcctatctcagtactattatt

SEQ ID NO: 25949 - RNA, 21 nt, synthetic construct
  source 1..21: mol_type = other RNA; note = Description of Artificial Sequence: Synthetic oligonucleotide
  modified_base 1: mod_base = OTHER; note = 2' fluoro-modified nucleoside - 2' fluorocytidine phosphorothioate linkage
  modified_base 2: mod_base = OTHER; note = 2' O-methyl modified nucleoside - 2' O-methyluridine phosphorothioate linkage
  modified_base 3: mod_base = OTHER; note = 2' fluoro-modified nucleoside - 2' fluoroadenosine
  modified_base 4: mod_base = OTHER; note = 2' O-methyl modified nucleoside - 2' O-methyluridine
  modified_base 5: mod_base = OTHER; note = 2' fluoro-modified nucleoside - 2' fluorocytidine
  modified_base 6: mod_base = OTHER; note = 2' O-methyl modified nucleoside - 2' O-methyluridine
  modified_base 7: mod_base = OTHER; note = 2' fluoro-modified nucleoside - 2' fluorocytidine
  modified_base 8: mod_base = OTHER; note = 2' fluoro-modified nucleoside - 2' fluoroadenosine
  modified_base 9: mod_base = OTHER; note = 2' fluoro-modified nucleoside - 2' fluoroguanosine
  modified_base 10: mod_base = OTHER; note = 2' O-methyl modified nucleoside - 2' O-methyluridine
  modified_base 11: mod_base = OTHER; note = 2' fluoro-modified nucleoside - 2' fluoroadenosine
  modified_base 12: mod_base = OTHER; note = 2' O-methyl modified nucleoside - 2' O-methylcytidine
  modified_base 13: mod_base = OTHER; note = 2' fluoro-modified nucleoside - 2' fluorouridine
  modified_base 14: mod_base = OTHER; note = 2' O-methyl modified nucleoside - 2' O-methyladenosine
  modified_base 15: mod_base = OTHER; note = 2' fluoro-modified nucleoside - 2' fluorouridine
  modified_base 16: mod_base = OTHER; note = 2' O-methyl modified nucleoside - 2' O-methyluridine
  modified_base 17: mod_base = OTHER; note = 2' fluoro-modified nucleoside - 2' fluorouridine
  modified_base 18: mod_base = OTHER; note = 2' O-methyl modified nucleoside - 2' O-methylcytidine
  modified_base 19: mod_base = OTHER; note = 2' fluoro-modified nucleoside - 2' fluoroadenosine phosphorothioate linkage
  modified_base 20: mod_base = OTHER; note = 2' O-methyl modified nucleoside - 2' O-methyluridine phosphorothioate linkage
  modified_base 21: mod_base = OTHER; note = 2' O-methyl modified nucleoside - 2' O-methyluridine
ctatctcagtactatttcatt

SEQ ID NO: 25950 - RNA, 21 nt, synthetic construct
  source 1..21: mol_type = other RNA; note = Description of Artificial Sequence: Synthetic oligonucleotide
  modified_base 1: mod_base = OTHER; note = 2' fluoro-modified nucleoside - 2' fluoroadenosine phosphorothioate linkage
  modified_base 2: mod_base = OTHER; note = 2' O-methyl modified nucleoside - 2' O-methyluridine phosphorothioate linkage
  modified_base 3: mod_base = OTHER; note = 2' fluoro-modified nucleoside - 2' fluorocytidine
  modified_base 4: mod_base = OTHER; note = 2' O-methyl modified nucleoside - 2' O-methyluridine
  modified_base 5: mod_base = OTHER; note = 2' fluoro-modified nucleoside - 2' fluorocytidine
  modified_base 6: mod_base = OTHER; note = 2' O-methyl modified nucleoside - 2' O-methyladenosine
  modified_base 7: mod_base = OTHER; note = 2' fluoro-modified nucleoside - 2' fluoroguanosine
  modified_base 8: mod_base = OTHER; note = 2' fluoro-modified nucleoside - 2' fluorouridine
  modified_base 9: mod_base = OTHER; note = 2' fluoro-modified nucleoside - 2' fluoroadenosine
  modified_base 10: mod_base = OTHER; note = 2' O-methyl modified nucleoside - 2' O-methylcytidine
  modified_base 11: mod_base = OTHER; note = 2' fluoro-modified nucleoside - 2' fluorouridine
  modified_base 12: mod_base = OTHER; note = 2' O-methyl modified nucleoside - 2' O-methyladenosine
  modified_base 13: mod_base = OTHER; note = 2' fluoro-modified nucleoside - 2' fluorouridine
  modified_base 14: mod_base = OTHER; note = 2' O-methyl modified nucleoside - 2' O-methyluridine
  modified_base 15: mod_base = OTHER; note = 2' fluoro-modified nucleoside - 2' fluorouridine
  modified_base 16: mod_base = OTHER; note = 2' O-methyl modified nucleoside - 2' O-methylcytidine
  modified_base 17: mod_base = OTHER; note = 2' fluoro-modified nucleoside - 2' fluorouridine
  modified_base 18: mod_base = OTHER; note = 2' O-methyl modified nucleoside - 2' O-methyladenosine
  modified_base 19: mod_base = OTHER; note = 2' fluoro-modified nucleoside - 2' fluoroadenosine phosphorothioate linkage
  modified_base 20: mod_base = OTHER; note = 2' O-methyl modified nucleoside - 2' O-methyluridine phosphorothioate linkage
  modified_base 21: mod_base = OTHER; note = 2' O-methyl modified nucleoside - 2' O-methyluridine
atctcagtactatttctaatt

SEQ ID NO: 25951 - RNA, 21 nt, synthetic construct
  source 1..21: mol_type = other RNA; note = Description of Artificial Sequence: Synthetic oligonucleotide
  modified_base 1: mod_base = OTHER; note = 2' fluoro-modified nucleoside - 2' fluorouridine phosphorothioate linkage
  modified_base 2: mod_base = OTHER; note = 2' O-methyl modified nucleoside - 2' O-methylcytidine phosphorothioate linkage
  modified_base 3: mod_base = OTHER; note = 2' fluoro-modified nucleoside - 2' fluorouridine
  modified_base 4: mod_base = OTHER; note = 2' O-methyl modified nucleoside - 2' O-methylcytidine
  modified_base 5: mod_base = OTHER; note = 2' fluoro-modified nucleoside - 2' fluoroadenosine
  modified_base 6: mod_base = OTHER; note = 2' O-methyl modified nucleoside - 2' O-methylguanosine
  modified_base 7: mod_base = OTHER; note = 2' fluoro-modified nucleoside - 2' fluorouridine
  modified_base 8: mod_base = OTHER; note = 2' fluoro-modified nucleoside - 2' fluoroadenosine
  modified_base 9: mod_base = OTHER; note = 2' fluoro-modified nucleoside - 2' fluorocytidine
  modified_base 10: mod_base = OTHER; note = 2' O-methyl modified nucleoside - 2' O-methyluridine
  modified_base 11: mod_base = OTHER; note = 2' fluoro-modified nucleoside - 2' fluoroadenosine
  modified_base 12: mod_base = OTHER; note = 2' O-methyl modified nucleoside - 2' O-methyluridine
  modified_base 13: mod_base = OTHER; note = 2' fluoro-modified nucleoside - 2' fluorouridine
  modified_base 14: mod_base = OTHER; note = 2' O-methyl modified nucleoside - 2' O-methyluridine
  modified_base 15: mod_base = OTHER; note = 2' fluoro-modified nucleoside - 2' fluorocytidine
  modified_base 16: mod_base = OTHER; note = 2' O-methyl modified nucleoside - 2' O-methyluridine
  modified_base 17: mod_base = OTHER; note = 2' fluoro-modified nucleoside - 2' fluoroadenosine
  modified_base 18: mod_base = OTHER; note = 2' O-methyl modified nucleoside - 2' O-methyladenosine
  modified_base 19: mod_base = OTHER; note = 2' fluoro-modified nucleoside - 2' fluoroadenosine phosphorothioate linkage
  modified_base 20: mod_base = OTHER; note = 2' O-methyl modified nucleoside - 2' O-methyluridine phosphorothioate linkage
  modified_base 21: mod_base = OTHER; note = 2' O-methyl modified nucleoside - 2' O-methyluridine
tctcagtactatttctaaatt

SEQ ID NO: 25952 - RNA, 21 nt, synthetic construct
  source 1..21: mol_type = other RNA; note = Description of Artificial Sequence: Synthetic oligonucleotide
  modified_base 1: mod_base = OTHER; note = 2' fluoro-modified nucleoside - 2' fluoroguanosine phosphorothioate linkage
  modified_base 2: mod_base = OTHER; note = 2' O-methyl modified nucleoside - 2' O-methyluridine phosphorothioate linkage
  modified_base 3: mod_base = OTHER; note = 2' fluoro-modified nucleoside - 2' fluoroadenosine
  modified_base 4: mod_base = OTHER; note = 2' O-methyl modified nucleoside - 2' O-methylcytidine
  modified_base 5: mod_base = OTHER; note = 2' fluoro-modified nucleoside - 2' fluorouridine
  modified_base 6: mod_base = OTHER; note = 2' O-methyl modified nucleoside - 2' O-methyladenosine
  modified_base 7: mod_base = OTHER; note = 2' fluoro-modified nucleoside - 2' fluorouridine
  modified_base 8: mod_base = OTHER; note = 2' fluoro-modified nucleoside - 2' fluorouridine
  modified_base 9: mod_base = OTHER; note = 2' fluoro-modified nucleoside - 2' fluorouridine
  modified_base 10: mod_base = OTHER; note = 2' O-methyl modified nucleoside - 2' O-methylcytidine
  modified_base 11: mod_base = OTHER; note = 2' fluoro-modified nucleoside - 2' fluorouridine
  modified_base 12: mod_base = OTHER; note = 2' O-methyl modified nucleoside - 2' O-methyladenosine
  modified_base 13: mod_base = OTHER; note = 2' fluoro-modified nucleoside - 2' fluoroadenosine
  modified_base 14: mod_base = OTHER; note = 2' O-methyl modified nucleoside - 2' O-methyladenosine
  modified_base 15: mod_base = OTHER; note = 2' fluoro-modified nucleoside - 2' fluoroguanosine
  modified_base 16: mod_base = OTHER; note = 2' O-methyl modified nucleoside - 2' O-methyladenosine
  modified_base 17: mod_base = OTHER; note = 2' fluoro-modified nucleoside - 2' fluorocytidine
  modified_base 18: mod_base = OTHER; note = 2' O-methyl modified nucleoside - 2' O-methylcytidine
  modified_base 19: mod_base = OTHER; note = 2' fluoro-modified nucleoside - 2' fluoroadenosine phosphorothioate linkage
  modified_base 20: mod_base = OTHER; note = 2' O-methyl modified nucleoside - 2' O-methyluridine phosphorothioate linkage
  modified_base 21: mod_base = OTHER; note = 2' O-methyl modified nucleoside - 2' O-methyluridine
gtactatttctaaagaccatt

SEQ ID NO: 25953 - RNA, 21 nt, synthetic construct
  source 1..21: mol_type = other RNA; note = Description of Artificial Sequence: Synthetic oligonucleotide
  modified_base 1: mod_base = OTHER; note = 2' fluoro-modified nucleoside - 2' fluorouridine phosphorothioate linkage
  modified_base 2: mod_base = OTHER; note = 2' O-methyl modified nucleoside - 2' O-methyluridine phosphorothioate linkage
  modified_base 3: mod_base = OTHER; note = 2' fluoro-modified nucleoside - 2' fluorouridine
  modified_base 4: mod_base = OTHER; note = 2' O-methyl modified nucleoside - 2' O-methylcytidine
  modified_base 5: mod_base = OTHER; note = 2' fluoro-modified nucleoside - 2' fluorouridine
  modified_base 6: mod_base = OTHER; note = 2' O-methyl modified nucleoside - 2' O-methyladenosine
  modified_base 7: mod_base = OTHER; note = 2' fluoro-modified nucleoside - 2' fluoroadenosine
  modified_base 8: mod_base = OTHER; note = 2' fluoro-modified nucleoside - 2' fluoroadenosine
  modified_base 9: mod_base = OTHER; note = 2' fluoro-modified nucleoside - 2' fluoroguanosine
  modified_base 10: mod_base = OTHER; note = 2' O-methyl modified nucleoside - 2' O-methyladenosine
  modified_base 11: mod_base = OTHER; note = 2' fluoro-modified nucleoside - 2' fluorocytidine
  modified_base 12: mod_base = OTHER; note = 2' O-methyl modified nucleoside - 2' O-methylcytidine
  modified_base 13: mod_base = OTHER; note = 2' fluoro-modified nucleoside - 2' fluorouridine
  modified_base 14: mod_base = OTHER; note = 2' O-methyl modified nucleoside - 2' O-methylguanosine
  modified_base 15: mod_base = OTHER; note = 2' fluoro-modified nucleoside - 2' fluoroadenosine
  modified_base 16: mod_base = OTHER; note = 2' O-methyl modified nucleoside - 2' O-methyluridine
  modified_base 17: mod_base = OTHER; note = 2' fluoro-modified nucleoside - 2' fluorouridine
  modified_base 18: mod_base = OTHER; note = 2' O-methyl modified nucleoside - 2' O-methyladenosine
  modified_base 19: mod_base = OTHER; note = 2' fluoro-modified nucleoside - 2' fluoroadenosine phosphorothioate linkage
  modified_base 20: mod_base = OTHER; note = 2' O-methyl modified nucleoside - 2' O-methyluridine phosphorothioate linkage
  modified_base 21: mod_base = OTHER; note = 2' O-methyl modified nucleoside - 2' O-methyluridine
tttctaaagacctgattaatt

SEQ ID NO: 25954 - RNA, 21 nt, synthetic construct
  source 1..21: mol_type = other RNA; note = Description of Artificial Sequence: Synthetic oligonucleotide
  modified_base 1: mod_base = OTHER; note = 2' fluoro-modified nucleoside - 2' fluorouridine phosphorothioate linkage
  modified_base 2: mod_base = OTHER; note = 2' O-methyl modified nucleoside - 2' O-methyluridine phosphorothioate linkage
  modified_base 3: mod_base = OTHER; note = 2' fluoro-modified nucleoside - 2' fluorocytidine
  modified_base 4: mod_base = OTHER; note = 2' O-methyl modified nucleoside - 2' O-methyluridine
  modified_base 5: mod_base = OTHER; note = 2' fluoro-modified nucleoside - 2' fluoroadenosine
  modified_base 6: mod_base = OTHER; note = 2' O-methyl modified nucleoside - 2' O-methyladenosine
  modified_base 7: mod_base = OTHER; note = 2' fluoro-modified nucleoside - 2' fluoroadenosine
  modified_base 8: mod_base = OTHER; note = 2' fluoro-modified nucleoside - 2' fluoroguanosine
  modified_base 9: mod_base = OTHER; note = 2' fluoro-modified nucleoside - 2' fluoroadenosine
  modified_base 10: mod_base = OTHER; note = 2' O-methyl modified nucleoside - 2' O-methylcytidine
  modified_base 11: mod_base = OTHER; note = 2' fluoro-modified nucleoside - 2' fluorocytidine
  modified_base 12: mod_base = OTHER; note = 2' O-methyl modified nucleoside - 2' O-methyluridine
  modified_base 13: mod_base = OTHER; note = 2' fluoro-modified nucleoside - 2' fluoroguanosine
  modified_base 14: mod_base = OTHER; note = 2' O-methyl modified nucleoside - 2' O-methyladenosine
  modified_base 15: mod_base = OTHER; note = 2' fluoro-modified nucleoside - 2' fluorouridine
  modified_base 16: mod_base = OTHER; note = 2' O-methyl modified nucleoside - 2' O-methyluridine
  modified_base 17: mod_base = OTHER; note = 2' fluoro-modified nucleoside - 2' fluoroadenosine
  modified_base 18: mod_base = OTHER; note = 2' O-methyl modified nucleoside - 2' O-methylcytidine
  modified_base 19: mod_base = OTHER; note = 2' fluoro-modified nucleoside - 2' fluoroadenosine phosphorothioate linkage
  modified_base 20: mod_base = OTHER; note = 2' O-methyl modified nucleoside - 2' O-methyluridine phosphorothioate linkage
  modified_base 21: mod_base = OTHER; note = 2' O-methyl modified nucleoside - 2' O-methyluridine
ttctaaagacctgattacatt

SEQ ID NO: 25955 - RNA, 21 nt, synthetic construct
  source 1..21: mol_type = other RNA; note = Description of Artificial Sequence: Synthetic oligonucleotide
  modified_base 1: mod_base = OTHER; note = 2' fluoro-modified nucleoside - 2' fluoroguanosine phosphorothioate linkage
  modified_base 2: mod_base = OTHER; note = 2' O-methyl modified nucleoside - 2' O-methyladenosine phosphorothioate linkage
  modified_base 3: mod_base = OTHER; note = 2' fluoro-modified nucleoside - 2' fluorocytidine
  modified_base 4: mod_base = OTHER; note = 2' O-methyl modified nucleoside - 2' O-methylcytidine
  modified_base 5: mod_base = OTHER; note = 2' fluoro-modified nucleoside - 2' fluorouridine
  modified_base 6: mod_base = OTHER; note = 2' O-methyl modified nucleoside - 2' O-methylguanosine
  modified_base 7: mod_base = OTHER; note = 2' fluoro-modified nucleoside - 2' fluoroadenosine
  modified_base 8: mod_base = OTHER; note = 2' fluoro-modified nucleoside - 2' fluorouridine
  modified_base 9: mod_base = OTHER; note = 2' fluoro-modified nucleoside - 2' fluorouridine
  modified_base 10: mod_base = OTHER; note = 2' O-methyl modified nucleoside - 2' O-methyladenosine
  modified_base 11: mod_base = OTHER; note = 2' fluoro-modified nucleoside - 2' fluorocytidine
  modified_base 12: mod_base = OTHER; note = 2' O-methyl modified nucleoside - 2' O-methyladenosine
  modified_base 13: mod_base = OTHER; note = 2' fluoro-modified nucleoside - 2' fluorouridine
  modified_base 14: mod_base = OTHER; note = 2' O-methyl modified nucleoside - 2' O-methyladenosine
  modified_base 15: mod_base = OTHER; note = 2' fluoro-modified nucleoside - 2' fluorouridine
  modified_base 16: mod_base = OTHER; note = 2' O-methyl modified nucleoside - 2' O-methyladenosine
  modified_base 17: mod_base = OTHER; note = 2' fluoro-modified nucleoside - 2' fluorouridine
  modified_base 18: mod_base = OTHER; note = 2' O-methyl modified nucleoside - 2' O-methylguanosine
  modified_base 19: mod_base = OTHER; note = 2' fluoro-modified nucleoside - 2' fluoroadenosine phosphorothioate linkage
  modified_base 20: mod_base = OTHER; note = 2' O-methyl modified nucleoside - 2' O-methyluridine phosphorothioate linkage
  modified_base 21: mod_base = OTHER; note = 2' O-methyl modified nucleoside - 2' O-methyluridine
gacctgattacatatatgatt

SEQ ID NO: 25956 - RNA, 21 nt, synthetic construct
  source 1..21: mol_type = other RNA; note = Description of Artificial Sequence: Synthetic oligonucleotide
  modified_base 1: mod_base = OTHER; note = 2' fluoro-modified nucleoside - 2' fluorocytidine phosphorothioate linkage
  modified_base 2: mod_base = OTHER; note = 2' O-methyl modified nucleoside - 2' O-methyluridine phosphorothioate linkage
  modified_base 3: mod_base = OTHER; note = 2' fluoro-modified nucleoside - 2' fluoroguanosine
  modified_base 4: mod_base = OTHER; note = 2' O-methyl modified nucleoside - 2' O-methyladenosine
  modified_base 5: mod_base = OTHER; note = 2' fluoro-modified nucleoside - 2' fluorouridine
  modified_base 6: mod_base = OTHER; note = 2' O-methyl modified nucleoside - 2' O-methyluridine
  modified_base 7: mod_base = OTHER; note = 2' fluoro-modified nucleoside - 2' fluoroadenosine
  modified_base 8: mod_base = OTHER; note = 2' fluoro-modified nucleoside - 2' fluorocytidine
  modified_base 9: mod_base = OTHER; note = 2' fluoro-modified nucleoside - 2' fluoroadenosine
  modified_base 10: mod_base = OTHER; note = 2' O-methyl modified nucleoside - 2' O-methyluridine
  modified_base 11: mod_base = OTHER; note = 2' fluoro-modified nucleoside - 2' fluoroadenosine
  modified_base 12: mod_base = OTHER; note = 2' O-methyl modified nucleoside - 2' O-methyluridine
  modified_base 13: mod_base = OTHER; note = 2' fluoro-modified nucleoside - 2' fluoroadenosine
  modified_base 14: mod_base = OTHER; note = 2' O-methyl modified nucleoside - 2' O-methyluridine
  modified_base 15: mod_base = OTHER; note = 2' fluoro-modified nucleoside - 2' fluoroguanosine
  modified_base 16: mod_base = OTHER; note = 2' O-methyl modified nucleoside - 2' O-methyladenosine
  modified_base 17: mod_base = OTHER; note = 2' fluoro-modified nucleoside - 2' fluoroguanosine
  modified_base 18: mod_base = OTHER; note = 2' O-methyl modified nucleoside - 2' O-methyluridine
  modified_base 19: mod_base = OTHER; note = 2' fluoro-modified nucleoside - 2' fluoroadenosine phosphorothioate linkage
  modified_base 20: mod_base = OTHER; note = 2' O-methyl modified nucleoside - 2' O-methyluridine phosphorothioate linkage
  modified_base 21: mod_base = OTHER; note = 2' O-methyl modified nucleoside - 2' O-methyluridine
ctgattacatatatgagtatt

SEQ ID NO: 25957 - RNA, 21 nt, synthetic construct
  source 1..21: mol_type = other RNA; note = Description of Artificial Sequence: Synthetic oligonucleotide
  modified_base 1: mod_base = OTHER; note = 2' fluoro-modified nucleoside - 2' fluorouridine phosphorothioate linkage
  modified_base 2: mod_base = OTHER; note = 2' O-methyl modified nucleoside - 2' O-methylguanosine phosphorothioate linkage
  modified_base 3: mod_base = OTHER; note = 2' fluoro-modified nucleoside - 2' fluoroadenosine
  modified_base 4: mod_base = OTHER; note = 2' O-methyl modified nucleoside - 2' O-methyluridine
  modified_base 5: mod_base = OTHER; note = 2' fluoro-modified nucleoside - 2' fluorouridine
  modified_base 6: mod_base = OTHER; note = 2' O-methyl modified nucleoside - 2' O-methyladenosine
  modified_base 7: mod_base = OTHER; note = 2' fluoro-modified nucleoside - 2' fluorocytidine
  modified_base 8: mod_base = OTHER; note = 2' fluoro-modified nucleoside - 2' fluoroadenosine
  modified_base 9: mod_base = OTHER; note = 2' fluoro-modified nucleoside - 2' fluorouridine
  modified_base 10: mod_base = OTHER; note = 2' O-methyl modified nucleoside - 2' O-methyladenosine
  modified_base 11: mod_base = OTHER; note = 2' fluoro-modified nucleoside - 2' fluorouridine
  modified_base 12: mod_base = OTHER; note = 2' O-methyl modified nucleoside - 2' O-methyladenosine
  modified_base 13: mod_base = OTHER; note = 2' fluoro-modified nucleoside - 2' fluorouridine
  modified_base 14: mod_base = OTHER; note = 2' O-methyl modified nucleoside - 2' O-methylguanosine
  modified_base 15: mod_base = OTHER; note = 2' fluoro-modified nucleoside - 2' fluoroadenosine
  modified_base 16: mod_base = OTHER; note = 2' O-methyl modified nucleoside - 2' O-methylguanosine
  modified_base 17: mod_base = OTHER; note = 2' fluoro-modified nucleoside - 2' fluorouridine
  modified_base 18: mod_base = OTHER; note = 2' O-methyl modified nucleoside - 2' O-methylguanosine
  modified_base 19: mod_base = OTHER; note = 2' fluoro-modified nucleoside - 2' fluoroadenosine phosphorothioate linkage
  modified_base 20: mod_base = OTHER; note = 2' O-methyl modified nucleoside - 2' O-methyluridine phosphorothioate linkage
  modified_base 21: mod_base = OTHER; note = 2' O-methyl modified nucleoside - 2' O-methyluridine
tgattacatatatgagtgatt

SEQ ID NO: 25958 - RNA, 21 nt, synthetic construct
  source 1..21: mol_type = other RNA; note = Description of Artificial Sequence: Synthetic oligonucleotide
  modified_base 1: mod_base = OTHER; note = 2' fluoro-modified nucleoside - 2' fluorouridine phosphorothioate linkage
  modified_base 2: mod_base = OTHER; note = 2' O-methyl modified nucleoside - 2' O-methyladenosine phosphorothioate linkage
  modified_base 3: mod_base = OTHER; note = 2' fluoro-modified nucleoside - 2' fluorouridine
  modified_base 4: mod_base = OTHER; note = 2' O-methyl modified nucleoside - 2' O-methyladenosine
  modified_base 5: mod_base = OTHER; note = 2' fluoro-modified nucleoside - 2' fluorouridine
  modified_base 6: mod_base = OTHER; note = 2' O-methyl modified nucleoside - 2' O-methylguanosine
  modified_base 7: mod_base = OTHER; note = 2' fluoro-modified nucleoside - 2' fluoroadenosine
  modified_base 8: mod_base = OTHER; note = 2' fluoro-modified nucleoside - 2' fluoroguanosine
  modified_base 9: mod_base = OTHER; note = 2' fluoro-modified nucleoside - 2' fluorouridine
  modified_base 10: mod_base = OTHER; note = 2' O-methyl modified nucleoside - 2' O-methylguanosine
  modified_base 11: mod_base = OTHER; note = 2' fluoro-modified nucleoside - 2' fluoroguanosine
  modified_base 12: mod_base = OTHER; note = 2' O-methyl modified nucleoside - 2' O-methylguanosine
  modified_base 13: mod_base = OTHER; note = 2' fluoro-modified nucleoside - 2' fluoroadenosine
  modified_base 14: mod_base = OTHER; note = 2' O-methyl modified nucleoside - 2' O-methylcytidine
  modified_base 15: mod_base = OTHER; note = 2' fluoro-modified nucleoside - 2' fluorocytidine
  modified_base 16: mod_base = OTHER; note = 2' O-methyl modified nucleoside - 2' O-methyladenosine
  modified_base 17: mod_base = OTHER; note = 2' fluoro-modified nucleoside - 2' fluoroadenosine
  modified_base 18: mod_base = OTHER; note = 2' O-methyl modified nucleoside - 2' O-methyladenosine
  modified_base 19: mod_base = OTHER; note = 2' fluoro-modified nucleoside - 2' fluoroadenosine phosphorothioate linkage
  modified_base 20: mod_base = OTHER; note = 2' O-methyl modified nucleoside - 2' O-methyluridine phosphorothioate linkage
  modified_base 21: mod_base = OTHER; note = 2' O-methyl modified nucleoside - 2' O-methyluridine
tatatgagtgggaccaaaatt

SEQ ID NO: 25959 - RNA, 21 nt, synthetic construct
  source 1..21: mol_type = other RNA; note = Description of Artificial Sequence: Synthetic oligonucleotide
  modified_base 1: mod_base = OTHER; note = 2' fluoro-modified nucleoside - 2' fluorouridine phosphorothioate linkage
  modified_base 2: mod_base = OTHER; note = 2' O-methyl modified nucleoside - 2' O-methyladenosine phosphorothioate linkage
  modified_base 3: mod_base = OTHER; note = 2' fluoro-modified nucleoside - 2' fluorouridine
  modified_base 4: mod_base = OTHER; note = 2' O-methyl modified nucleoside - 2' O-methylguanosine
  modified_base 5: mod_base = OTHER; note = 2' fluoro-modified nucleoside - 2' fluoroadenosine
  modified_base 6: mod_base = OTHER; note = 2' O-methyl modified nucleoside - 2' O-methylguanosine
  modified_base 7: mod_base = OTHER; note = 2' fluoro-modified nucleoside - 2' fluorouridine
  modified_base 8: mod_base = OTHER; note = 2' fluoro-modified nucleoside - 2' fluoroguanosine
  modified_base 9: mod_base = OTHER; note = 2' fluoro-modified nucleoside - 2' fluoroguanosine
  modified_base 10: mod_base = OTHER; note = 2' O-methyl modified nucleoside - 2' O-methylguanosine
  modified_base 11: mod_base = OTHER; note = 2' fluoro-modified nucleoside - 2' fluoroadenosine
  modified_base 12: mod_base = OTHER; note = 2' O-methyl modified nucleoside - 2' O-methylcytidine
  modified_base 13: mod_base = OTHER; note = 2' fluoro-modified nucleoside - 2' fluorocytidine
  modified_base 14: mod_base = OTHER; note = 2' O-methyl modified nucleoside - 2' O-methyladenosine
  modified_base 15: mod_base = OTHER; note = 2' fluoro-modified nucleoside - 2' fluoroadenosine
  modified_base 16: mod_base = OTHER; note = 2' O-methyl modified nucleoside - 2' O-methyladenosine
  modified_base 17: mod_base = OTHER; note = 2' fluoro-modified nucleoside - 2' fluoroadenosine
  modified_base 18: mod_base = OTHER; note = 2' O-methyl modified nucleoside - 2' O-methylguanosine
  modified_base 19: mod_base = OTHER; note = 2' fluoro-modified nucleoside - 2' fluoroadenosine phosphorothioate linkage
  modified_base 20: mod_base = OTHER; note = 2' O-methyl modified nucleoside - 2' O-methyluridine phosphorothioate linkage
  modified_base 21: mod_base = OTHER; note = 2' O-methyl modified nucleoside - 2' O-methyluridine
tatgagtgggaccaaaagatt

SEQ ID NO: 25960 - RNA, 21 nt, synthetic construct
  source 1..21: mol_type = other RNA; note = Description of Artificial Sequence: Synthetic oligonucleotide
  modified_base 1: mod_base = OTHER; note = 2' fluoro-modified nucleoside - 2' fluorouridine phosphorothioate linkage
  modified_base 2: mod_base = OTHER; note = 2' O-methyl modified nucleoside - 2' O-methylguanosine phosphorothioate linkage
  modified_base 3: mod_base = OTHER; note = 2' fluoro-modified nucleoside - 2' fluoroadenosine
  modified_base 4: mod_base = OTHER; note = 2' O-methyl modified nucleoside - 2' O-methylguanosine
  modified_base 5: mod_base = OTHER; note = 2' fluoro-modified nucleoside - 2' fluorouridine
  modified_base 6: mod_base = OTHER; note = 2' O-methyl modified nucleoside - 2' O-methylguanosine
  modified_base 7: mod_base = OTHER; note = 2' fluoro-modified nucleoside - 2' fluoroguanosine
  modified_base 8: mod_base = OTHER; note = 2' fluoro-modified nucleoside - 2' fluoroguanosine
  modified_base 9: mod_base = OTHER; note = 2' fluoro-modified nucleoside - 2' fluoroadenosine
  modified_base 10: mod_base = OTHER; note = 2' O-methyl modified nucleoside - 2' O-methylcytidine
  modified_base 11: mod_base = OTHER; note = 2' fluoro-modified nucleoside - 2' fluorocytidine
  modified_base 12: mod_base = OTHER; note = 2' O-methyl modified nucleoside - 2' O-methyladenosine
  modified_base 13: mod_base = OTHER; note = 2' fluoro-modified nucleoside - 2' fluoroadenosine
  modified_base 14: mod_base = OTHER; note = 2' O-methyl modified nucleoside - 2' O-methyladenosine
  modified_base 15: mod_base = OTHER; note = 2' fluoro-modified nucleoside - 2' fluoroadenosine
  modified_base 16: mod_base = OTHER; note = 2' O-methyl modified nucleoside - 2' O-methylguanosine
  modified_base 17: mod_base = OTHER; note = 2' fluoro-modified nucleoside - 2' fluorouridine
  modified_base 18: mod_base = OTHER; note = 2' O-methyl modified nucleoside - 2' O-methyladenosine
  modified_base 19: mod_base = OTHER; note = 2' fluoro-modified nucleoside - 2' fluoroadenosine phosphorothioate linkage
  modified_base 20: mod_base = OTHER; note = 2' O-methyl modified nucleoside - 2' O-methyluridine phosphorothioate linkage
  modified_base 21: mod_base = OTHER; note = 2' O-methyl modified nucleoside - 2' O-methyluridine
tgagtgggaccaaaagtaatt

SEQ ID NO: 25961 - RNA, 21 nt, synthetic construct
  source 1..21: mol_type = other RNA; note = Description of Artificial Sequence: Synthetic oligonucleotide
  modified_base 1: mod_base = OTHER; note = 2' fluoro-modified nucleoside - 2' fluoroadenosine phosphorothioate linkage
  modified_base 2: mod_base = OTHER; note = 2' O-methyl modified nucleoside - 2' O-methylguanosine phosphorothioate linkage
  modified_base 3: mod_base = OTHER; note = 2' fluoro-modified nucleoside - 2' fluorouridine
  modified_base 4: mod_base = OTHER; note = 2' O-methyl modified nucleoside - 2' O-methylguanosine
  modified_base 5: mod_base = OTHER; note = 2' fluoro-modified nucleoside - 2' fluoroguanosine
  modified_base 6: mod_base = OTHER; note = 2' O-methyl modified nucleoside - 2' O-methylguanosine
  modified_base 7: mod_base = OTHER; note = 2' fluoro-modified nucleoside - 2' fluoroadenosine
  modified_base 8: mod_base = OTHER; note = 2' fluoro-modified nucleoside - 2' fluorocytidine
  modified_base 9: mod_base = OTHER; note = 2' fluoro-modified nucleoside - 2' fluorocytidine
  modified_base 10: mod_base = OTHER; note = 2' O-methyl modified nucleoside - 2' O-methyladenosine
  modified_base 11: mod_base = OTHER; note = 2' fluoro-modified nucleoside - 2' fluoroadenosine
  modified_base 12: mod_base = OTHER; note = 2' O-methyl modified nucleoside - 2' O-methyladenosine
  modified_base 13: mod_base = OTHER; note = 2' fluoro-modified nucleoside - 2' fluoroadenosine
  modified_base 14: mod_base = OTHER; note = 2' O-methyl modified nucleoside - 2' O-methylguanosine
  modified_base 15: mod_base = OTHER; note = 2' fluoro-modified nucleoside - 2' fluorouridine
  modified_base 16: mod_base = OTHER; note = 2' O-methyl modified nucleoside - 2' O-methyladenosine
  modified_base 17: mod_base = OTHER; note = 2' fluoro-modified nucleoside - 2' fluorocytidine
  modified_base 18: mod_base = OTHER; note = 2' O-methyl modified nucleoside - 2' O-methylcytidine
  modified_base 19: mod_base = OTHER; note = 2' fluoro-modified nucleoside - 2' fluoroadenosine phosphorothioate linkage
  modified_base 20: mod_base = OTHER; note = 2' O-methyl modified nucleoside - 2' O-methyluridine phosphorothioate linkage
  modified_base 21: mod_base = OTHER; note = 2' O-methyl modified nucleoside - 2' O-methyluridine
agtgggaccaaaagtaccatt

SEQ ID NO: 25962 - RNA, 21 nt, synthetic construct
  source 1..21: mol_type = other RNA; note = Description of Artificial Sequence: Synthetic oligonucleotide
  modified_base 1: mod_base = OTHER; note = 2' fluoro-modified nucleoside - 2' fluoroguanosine phosphorothioate linkage
  modified_base 2: mod_base = OTHER; note = 2' O-methyl modified nucleoside - 2' O-methyluridine phosphorothioate linkage
  modified_base 3: mod_base = OTHER; note = 2' fluoro-modified nucleoside - 2' fluoroguanosine
  modified_base 4: mod_base = OTHER; note = 2' O-methyl modified nucleoside - 2' O-methylguanosine
  modified_base 5: mod_base = OTHER; note = 2' fluoro-modified nucleoside - 2' fluoroguanosine
  modified_base 6: mod_base = OTHER; note = 2' O-methyl modified nucleoside - 2' O-methyladenosine
  modified_base 7: mod_base = OTHER; note = 2' fluoro-modified nucleoside - 2' fluorocytidine
  modified_base 8: mod_base = OTHER; note = 2' fluoro-modified nucleoside - 2' fluorocytidine
  modified_base 9: mod_base = OTHER; note = 2' fluoro-modified nucleoside - 2' fluoroadenosine
  modified_base 10: mod_base = OTHER; note = 2' O-methyl modified nucleoside - 2' O-methyladenosine
  modified_base 11: mod_base = OTHER; note = 2' fluoro-modified nucleoside - 2' fluoroadenosine
  modified_base 12: mod_base = OTHER; note = 2' O-methyl modified nucleoside - 2' O-methyladenosine
  modified_base 13: mod_base = OTHER; note = 2' fluoro-modified nucleoside - 2' fluoroguanosine
  modified_base 14: mod_base = OTHER; note = 2' O-methyl modified nucleoside - 2' O-methyluridine
  modified_base 15: mod_base = OTHER; note = 2' fluoro-modified nucleoside - 2' fluoroadenosine
  modified_base 16: mod_base = OTHER; note = 2' O-methyl modified nucleoside - 2' O-methylcytidine
  modified_base 17: mod_base = OTHER; note = 2' fluoro-modified nucleoside - 2' fluorocytidine
  modified_base 18: mod_base = OTHER; note = 2' O-methyl modified nucleoside - 2' O-methylguanosine
  modified_base 19: mod_base = OTHER; note = 2' fluoro-modified nucleoside - 2' fluoroadenosine phosphorothioate linkage
  modified_base 20: mod_base = OTHER; note = 2' O-methyl modified nucleoside - 2' O-methyluridine phosphorothioate linkage
  modified_base 21: mod_base = OTHER; note = 2' O-methyl modified nucleoside - 2' O-methyluridine
gtgggaccaaaagtaccgatt

SEQ ID NO: 25963 - RNA, 21 nt, synthetic construct
  source 1..21: mol_type = other RNA; note = Description of Artificial Sequence: Synthetic oligonucleotide
  modified_base 1: mod_base = OTHER; note = 2' fluoro-modified nucleoside - 2' fluoroguanosine phosphorothioate linkage
  modified_base 2: mod_base = OTHER; note = 2' O-methyl modified nucleoside - 2' O-methylguanosine phosphorothioate linkage
  modified_base 3: mod_base = OTHER; note = 2' fluoro-modified nucleoside - 2' fluoroadenosine
  modified_base 4: mod_base = OTHER; note = 2' O-methyl modified nucleoside - 2' O-methylcytidine
  modified_base 5: mod_base = OTHER; note = 2' fluoro-modified nucleoside - 2' fluorocytidine
  modified_base 6: mod_base = OTHER; note = 2' O-methyl modified nucleoside - 2' O-methyladenosine
  modified_base 7: mod_base = OTHER; note = 2' fluoro-modified nucleoside - 2' fluoroadenosine
  modified_base 8: mod_base = OTHER; note = 2' fluoro-modified nucleoside - 2' fluoroadenosine
  modified_base 9: mod_base = OTHER; note = 2' fluoro-modified nucleoside - 2' fluoroadenosine
  modified_base 10: mod_base = OTHER; note = 2' O-methyl modified nucleoside - 2' O-methylguanosine
  modified_base 11: mod_base = OTHER; note = 2' fluoro-modified nucleoside - 2' fluorouridine
  modified_base 12: mod_base = OTHER; note = 2' O-methyl modified nucleoside - 2' O-methyladenosine
  modified_base 13: mod_base = OTHER; note = 2' fluoro-modified nucleoside - 2' fluorocytidine
  modified_base 14: mod_base = OTHER; note = 2' O-methyl modified nucleoside - 2' O-methylcytidine
  modified_base 15: mod_base = OTHER; note = 2' fluoro-modified nucleoside - 2' fluoroguanosine
  modified_base 16: mod_base = OTHER; note = 2' O-methyl modified nucleoside - 2' O-methyladenosine
  modified_base 17: mod_base = OTHER; note = 2' fluoro-modified nucleoside - 2' fluoroguanosine
  modified_base 18: mod_base = OTHER; note = 2' O-methyl modified nucleoside - 2' O-methyluridine
  modified_base 19: mod_base = OTHER; note = 2' fluoro-modified nucleoside - 2' fluoroadenosine phosphorothioate linkage
  modified_base 20: mod_base = OTHER; note = 2' O-methyl modified nucleoside - 2' O-methyluridine phosphorothioate linkage
  modified_base 21: mod_base = OTHER; note = 2' O-methyl modified nucleoside - 2' O-methyluridine
ggaccaaaagtaccgagtatt

SEQ ID NO: 25964 - RNA, 21 nt, synthetic construct
  source 1..21: mol_type = other RNA; note = Description of Artificial Sequence: Synthetic oligonucleotide
  modified_base 1: mod_base = OTHER; note = 2' fluoro-modified nucleoside - 2' fluoroguanosine phosphorothioate linkage
  modified_base 2: mod_base = OTHER; note = 2' O-methyl modified nucleoside - 2' O-methyladenosine phosphorothioate linkage
  modified_base 3: mod_base = OTHER; note = 2' fluoro-modified nucleoside - 2' fluorocytidine
  modified_base 4: mod_base = OTHER; note = 2' O-methyl modified nucleoside - 2' O-methylcytidine
  modified_base 5: mod_base = OTHER; note = 2' fluoro-modified nucleoside - 2' fluoroadenosine
  modified_base 6: mod_base = OTHER; note = 2' O-methyl modified nucleoside - 2' O-methyladenosine
  modified_base 7: mod_base = OTHER; note = 2' fluoro-modified nucleoside - 2' fluoroadenosine
  modified_base 8: mod_base = OTHER; note = 2' fluoro-modified nucleoside - 2' fluoroadenosine
  modified_base 9: mod_base = OTHER; note = 2' fluoro-modified nucleoside - 2' fluoroguanosine
  modified_base 10: mod_base = OTHER; note = 2' O-methyl modified nucleoside - 2' O-methyluridine
  modified_base 11: mod_base = OTHER; note = 2' fluoro-modified nucleoside - 2' fluoroadenosine
  modified_base 12: mod_base = OTHER; note = 2' O-methyl modified nucleoside - 2' O-methylcytidine
  modified_base 13: mod_base = OTHER; note = 2' fluoro-modified nucleoside - 2' fluorocytidine
  modified_base 14: mod_base = OTHER; note = 2' O-methyl modified nucleoside - 2' O-methylguanosine
  modified_base 15: mod_base = OTHER; note = 2' fluoro-modified nucleoside - 2' fluoroadenosine
  modified_base 16: mod_base = OTHER; note = 2' O-methyl modified nucleoside - 2' O-methylguanosine
  modified_base 17: mod_base = OTHER; note = 2' fluoro-modified nucleoside - 2' fluorouridine
  modified_base 18: mod_base = OTHER; note = 2' O-methyl modified nucleoside - 2' O-methyluridine
  modified_base 19: mod_base = OTHER; note = 2' fluoro-modified nucleoside - 2' fluoroadenosine phosphorothioate linkage
  modified_base 20: mod_base = OTHER; note = 2' O-methyl modified nucleoside - 2' O-methyluridine phosphorothioate linkage
  modified_base 21: mod_base = OTHER; note = 2' O-methyl modified nucleoside - 2' O-methyluridine
gaccaaaagtaccgagttatt

SEQ ID NO: 25965 - RNA, 21 nt, synthetic construct
  source 1..21: mol_type = other RNA; note = Description of Artificial Sequence: Synthetic oligonucleotide
  modified_base 1: mod_base = OTHER; note = 2' fluoro-modified nucleoside - 2' fluorocytidine phosphorothioate linkage
  modified_base 2: mod_base = OTHER; note = 2' O-methyl modified nucleoside - 2' O-methyladenosine phosphorothioate linkage
  modified_base 3: mod_base = OTHER; note = 2' fluoro-modified nucleoside - 2' fluoroadenosine
  modified_base 4: mod_base = OTHER; note = 2' O-methyl modified nucleoside - 2' O-methyladenosine
  modified_base 5: mod_base = OTHER; note = 2' fluoro-modified nucleoside - 2' fluoroadenosine
  modified_base 6: mod_base = OTHER; note = 2' O-methyl modified nucleoside - 2' O-methylguanosine
  modified_base 7: mod_base = OTHER; note = 2' fluoro-modified nucleoside - 2' fluorouridine
  modified_base 8: mod_base = OTHER; note = 2' fluoro-modified nucleoside - 2' fluoroadenosine
  modified_base 9: mod_base = OTHER; note = 2' fluoro-modified nucleoside - 2' fluorocytidine
  modified_base 10: mod_base = OTHER; note = 2' O-methyl modified nucleoside - 2' O-methylcytidine
  modified_base 11: mod_base = OTHER; note = 2' fluoro-modified nucleoside - 2' fluoroguanosine
  modified_base 12: mod_base = OTHER; note = 2' O-methyl modified nucleoside - 2' O-methyladenosine
  modified_base 13: mod_base = OTHER; note = 2' fluoro-modified nucleoside - 2' fluoroguanosine
  modified_base 14: mod_base = OTHER; note = 2' O-methyl modified nucleoside - 2' O-methyluridine
  modified_base 15: mod_base = OTHER; note = 2' fluoro-modified nucleoside - 2' fluorouridine
  modified_base 16: mod_base = OTHER; note = 2' O-methyl modified nucleoside - 2' O-methylcytidine
  modified_base 17: mod_base = OTHER; note = 2' fluoro-modified nucleoside - 2' fluoroadenosine
  modified_base 18: mod_base = OTHER; note = 2' O-methyl modified nucleoside - 2' O-methyladenosine
  modified_base 19: mod_base = OTHER; note = 2' fluoro-modified nucleoside - 2' fluoroadenosine phosphorothioate linkage
  modified_base 20: mod_base = OTHER; note = 2' O-methyl modified nucleoside - 2' O-methyluridine phosphorothioate linkage
  modified_base 21: mod_base = OTHER; note = 2' O-methyl modified nucleoside - 2' O-methyluridine
caaaagtaccgagttcaaatt

SEQ ID NO: 25966 - RNA, 21 nt, synthetic construct
  source 1..21: mol_type = other RNA; note = Description of Artificial Sequence: Synthetic oligonucleotide
  modified_base 1: mod_base = OTHER; note = 2' fluoro-modified nucleoside - 2' fluorocytidine phosphorothioate linkage
  modified_base 2: mod_base = OTHER; note = 2' O-methyl modified nucleoside - 2' O-methylcytidine phosphorothioate linkage
  modified_base 3: mod_base = OTHER; note = 2' fluoro-modified nucleoside - 2' fluoroguanosine
  modified_base 4: mod_base = OTHER; note = 2' O-methyl modified nucleoside - 2' O-methyladenosine
  modified_base 5: mod_base = OTHER; note = 2' fluoro-modified nucleoside - 2' fluoroguanosine
  modified_base 6: mod_base = OTHER; note = 2' O-methyl modified nucleoside - 2' O-methyluridine
  modified_base 7: mod_base = OTHER; note = 2' fluoro-modified nucleoside - 2' fluorouridine
  modified_base 8: mod_base = OTHER; note = 2' fluoro-modified nucleoside - 2' fluorocytidine
  modified_base 9: mod_base = OTHER; note = 2' fluoro-modified nucleoside - 2' fluoroadenosine
  modified_base 10: mod_base = OTHER; note = 2' O-methyl modified nucleoside - 2' O-methyladenosine
  modified_base 11: mod_base = OTHER; note = 2' fluoro-modified nucleoside - 2' fluorocytidine
  modified_base 12: mod_base = OTHER; note = 2' O-methyl modified nucleoside - 2' O-methyladenosine
  modified_base 13: mod_base = OTHER; note = 2' fluoro-modified nucleoside - 2' fluoroadenosine
  modified_base 14: mod_base = OTHER; note = 2' O-methyl modified nucleoside - 2' O-methylcytidine
  modified_base 15: mod_base = OTHER; note = 2' fluoro-modified nucleoside - 2' fluoroadenosine
  modified_base 16: mod_base = OTHER; note = 2' O-methyl modified nucleoside - 2' O-methylcytidine
  modified_base 17: mod_base = OTHER; note = 2' fluoro-modified nucleoside - 2' fluorocytidine
  modified_base 18: mod_base = OTHER; note = 2' O-methyl modified nucleoside - 2' O-methylguanosine
  modified_base 19: mod_base = OTHER; note = 2' fluoro-modified nucleoside - 2' fluoroadenosine phosphorothioate linkage
  modified_base 20: mod_base = OTHER; note = 2' O-methyl modified nucleoside - 2' O-methyluridine phosphorothioate linkage
  modified_base 21: mod_base = OTHER; note = 2' O-methyl modified nucleoside - 2' O-methyluridine
ccgagttcaacaacaccgatt

SEQ ID NO: 25967 - RNA, 21 nt, synthetic construct
  source 1..21: mol_type = other RNA; note = Description of Artificial Sequence: Synthetic oligonucleotide
  modified_base 1: mod_base = OTHER; note = 2' fluoro-modified nucleoside - 2' fluoroadenosine phosphorothioate linkage
  modified_base 2: mod_base = OTHER; note = 2' O-methyl modified nucleoside - 2' O-methyladenosine phosphorothioate linkage
  modified_base 3: mod_base = OTHER; note = 2' fluoro-modified nucleoside - 2' fluorocytidine
  modified_base 4: mod_base = OTHER; note = 2' O-methyl modified nucleoside - 2' O-methyladenosine
  modified_base 5: mod_base = OTHER; note = 2' fluoro-modified nucleoside - 2' fluoroadenosine
  modified_base 6: mod_base = OTHER; note = 2' O-methyl modified nucleoside - 2' O-methylcytidine
  modified_base 7: mod_base = OTHER; note = 2' fluoro-modified nucleoside - 2' fluoroadenosine
  modified_base 8: mod_base = OTHER; note = 2' fluoro-modified nucleoside - 2' fluorocytidine
  modified_base 9: mod_base = OTHER; note = 2' fluoro-modified nucleoside - 2' fluorocytidine
  modified_base 10: mod_base = OTHER; note = 2' O-methyl modified nucleoside - 2' O-methylguanosine
  modified_base 11: mod_base = OTHER; note = 2' fluoro-modified nucleoside - 2' fluorouridine
  modified_base 12: mod_base = OTHER; note = 2' O-methyl modified nucleoside - 2' O-methylcytidine
  modified_base 13: mod_base = OTHER; note = 2' fluoro-modified nucleoside - 2' fluorouridine
  modified_base 14: mod_base = OTHER; note = 2' O-methyl modified nucleoside - 2' O-methylcytidine
  modified_base 15: mod_base = OTHER; note = 2' fluoro-modified nucleoside - 2' fluorouridine
  modified_base 16: mod_base = OTHER; note = 2' O-methyl modified nucleoside - 2' O-methyluridine
  modified_base 17: mod_base = OTHER; note = 2' fluoro-modified nucleoside - 2' fluoroguanosine
  modified_base 18: mod_base = OTHER; note = 2' O-methyl modified nucleoside - 2' O-methyluridine
  modified_base 19: mod_base = OTHER; note = 2' fluoro-modified nucleoside - 2' fluoroadenosine phosphorothioate linkage
  modified_base 20: mod_base = OTHER; note = 2' O-methyl modified nucleoside - 2' O-methyluridine phosphorothioate linkage
  modified_base 21: mod_base = OTHER; note = 2' O-methyl modified nucleoside - 2' O-methyluridine
aacaacaccgtctcttgtatt

SEQ ID NO: 25968 - RNA, 21 nt, synthetic construct
  source 1..21: mol_type = other RNA; note = Description of Artificial Sequence: Synthetic oligonucleotide
  modified_base 1: mod_base = OTHER; note = 2' fluoro-modified nucleoside - 2' fluoroadenosine phosphorothioate linkage
  modified_base 2: mod_base = OTHER; note = 2' O-methyl modified nucleoside - 2' O-methylcytidine phosphorothioate linkage
  modified_base 3: mod_base = OTHER; note = 2' fluoro-modified nucleoside - 2' fluoroadenosine
  modified_base 4: mod_base = OTHER; note = 2' O-methyl modified nucleoside - 2' O-methyladenosine
  modified_base 5: mod_base = OTHER; note = 2' fluoro-modified nucleoside - 2' fluorocytidine
  modified_base 6: mod_base = OTHER; note = 2' O-methyl modified nucleoside - 2' O-methyladenosine
  modified_base 7: mod_base = OTHER; note = 2' fluoro-modified nucleoside - 2' fluorocytidine
  modified_base 8: mod_base = OTHER; note = 2' fluoro-modified nucleoside - 2' fluorocytidine
  modified_base 9: mod_base = OTHER; note = 2' fluoro-modified nucleoside - 2' fluoroguanosine
  modified_base 10: mod_base = OTHER; note = 2' O-methyl modified nucleoside - 2' O-methyluridine
  modified_base 11: mod_base = OTHER; note = 2' fluoro-modified nucleoside - 2' fluorocytidine
  modified_base 12: mod_base = OTHER; note = 2' O-methyl modified nucleoside - 2' O-methyluridine
  modified_base 13: mod_base = OTHER; note = 2' fluoro-modified nucleoside - 2' fluorocytidine
  modified_base 14: mod_base = OTHER; note = 2' O-methyl modified nucleoside - 2' O-methyluridine
  modified_base 15: mod_base = OTHER; note = 2' fluoro-modified nucleoside - 2' fluorouridine
  modified_base 16: mod_base = OTHER; note = 2' O-methyl modified nucleoside - 2' O-methylguanosine
  modified_base 17: mod_base = OTHER; note = 2' fluoro-modified nucleoside - 2' fluorouridine
  modified_base 18: mod_base = OTHER; note = 2' O-methyl modified nucleoside - 2' O-methyladenosine
  modified_base 19: mod_base = OTHER; note = 2' fluoro-modified nucleoside - 2' fluoroadenosine phosphorothioate linkage
  modified_base 20: mod_base = OTHER; note = 2' O-methyl modified nucleoside - 2' O-methyluridine phosphorothioate linkage
  modified_base 21: mod_base = OTHER; note = 2' O-methyl modified nucleoside - 2' O-methyluridine
acaacaccgtctcttgtaatt

SEQ ID NO: 25969 - RNA, 21 nt, synthetic construct
  source 1..21: mol_type = other RNA; note = Description of Artificial Sequence: Synthetic oligonucleotide
  modified_base 1: mod_base = OTHER; note = 2' fluoro-modified nucleoside - 2' fluorocytidine phosphorothioate linkage
  modified_base 2: mod_base = OTHER; note = 2' O-methyl modified nucleoside - 2' O-methyladenosine phosphorothioate linkage
  modified_base 3: mod_base = OTHER; note = 2' fluoro-modified nucleoside - 2' fluorocytidine
  modified_base 4: mod_base = OTHER; note = 2' O-methyl modified nucleoside - 2' O-methylcytidine
  modified_base 5: mod_base = OTHER; note = 2' fluoro-modified nucleoside - 2' fluoroguanosine
  modified_base 6: mod_base = OTHER; note = 2' O-methyl modified nucleoside - 2' O-methyluridine
  modified_base 7: mod_base = OTHER; note = 2' fluoro-modified nucleoside - 2' fluorocytidine
  modified_base 8: mod_base = OTHER; note = 2' fluoro-modified nucleoside - 2' fluorouridine
  modified_base 9: mod_base = OTHER; note = 2' fluoro-modified nucleoside - 2' fluorocytidine
  modified_base 10: mod_base = OTHER; note = 2' O-methyl modified nucleoside - 2' O-methyluridine
  modified_base 11: mod_base = OTHER; note = 2' fluoro-modified nucleoside - 2' fluorouridine
  modified_base 12: mod_base = OTHER; note = 2' O-methyl modified nucleoside - 2' O-methylguanosine
  modified_base 13: mod_base = OTHER; note = 2' fluoro-modified nucleoside - 2' fluorouridine
  modified_base 14: mod_base = OTHER; note = 2' O-methyl modified nucleoside - 2' O-methyladenosine
  modified_base 15: mod_base = OTHER; note = 2' fluoro-modified nucleoside - 2' fluoroguanosine
  modified_base 16: mod_base = OTHER; note = 2' O-methyl modified nucleoside - 2' O-methylcytidine
  modified_base 17: mod_base = OTHER; note = 2' fluoro-modified nucleoside - 2' fluoroadenosine
  modified_base 18: mod_base = OTHER; note = 2' O-methyl modified nucleoside - 2' O-methyladenosine
  modified_base 19: mod_base = OTHER; note = 2' fluoro-modified nucleoside - 2' fluoroadenosine phosphorothioate linkage
  modified_base 20: mod_base = OTHER; note = 2' O-methyl modified nucleoside - 2' O-methyluridine phosphorothioate linkage
  modified_base 21: mod_base = OTHER; note = 2' O-methyl modified nucleoside - 2' O-methyluridine
caccgtctcttgtagcaaatt

SEQ ID NO: 25970 - RNA, 21 nt, synthetic construct
  source 1..21: mol_type = other RNA; note = Description of Artificial Sequence: Synthetic oligonucleotide
  modified_base 1: mod_base = OTHER; note = 2' fluoro-modified nucleoside - 2' fluorocytidine phosphorothioate linkage
  modified_base 2: mod_base = OTHER; note = 2' O-methyl modified nucleoside - 2' O-methylguanosine phosphorothioate linkage
  modified_base 3: mod_base = OTHER; note = 2' fluoro-modified nucleoside - 2' fluorouridine
  modified_base 4: mod_base = OTHER; note = 2' O-methyl modified nucleoside - 2' O-methylcytidine
  modified_base 5: mod_base = OTHER; note = 2' fluoro-modified nucleoside - 2' fluorouridine
  modified_base 6: mod_base = OTHER; note = 2' O-methyl modified nucleoside - 2' O-methylcytidine
  modified_base 7: mod_base = OTHER; note = 2' fluoro-modified nucleoside - 2' fluorouridine
  modified_base 8: mod_base = OTHER; note = 2' fluoro-modified nucleoside - 2' fluorouridine
  modified_base 9: mod_base = OTHER; note = 2' fluoro-modified nucleoside - 2' fluoroguanosine
  modified_base 10: mod_base = OTHER; note = 2' O-methyl modified nucleoside - 2' O-methyluridine
  modified_base 11: mod_base = OTHER; note = 2' fluoro-modified nucleoside - 2' fluoroadenosine
  modified_base 12: mod_base = OTHER; note = 2' O-methyl modified nucleoside - 2' O-methylguanosine
  modified_base 13: mod_base = OTHER; note = 2' fluoro-modified nucleoside - 2' fluorocytidine
  modified_base 14: mod_base = OTHER; note = 2' O-methyl modified nucleoside - 2' O-methyladenosine
  modified_base 15: mod_base = OTHER; note = 2' fluoro-modified nucleoside - 2' fluoroadenosine
  modified_base 16: mod_base = OTHER; note = 2' O-methyl modified nucleoside - 2' O-methyluridine
  modified_base 17: mod_base = OTHER; note = 2' fluoro-modified nucleoside - 2' fluorocytidine
  modified_base 18: mod_base = OTHER; note = 2' O-methyl modified nucleoside - 2' O-methylguanosine
  modified_base 19: mod_base = OTHER; note = 2' fluoro-modified nucleoside - 2' fluoroadenosine phosphorothioate linkage
  modified_base 20: mod_base = OTHER; note = 2' O-methyl modified nucleoside - 2' O-methyluridine phosphorothioate linkage
  modified_base 21: mod_base = OTHER; note = 2' O-methyl modified nucleoside - 2' O-methyluridine
cgtctcttgtagcaatcgatt

SEQ ID NO: 25971 - RNA, 21 nt, synthetic construct
  source 1..21: mol_type = other RNA; note = Description of Artificial Sequence: Synthetic oligonucleotide
  modified_base 1: mod_base = OTHER; note = 2' fluoro-modified nucleoside - 2' fluorouridine phosphorothioate linkage
  modified_base 2: mod_base = OTHER; note = 2' O-methyl modified nucleoside - 2' O-methylcytidine phosphorothioate linkage
  modified_base 3: mod_base = OTHER; note = 2' fluoro-modified nucleoside - 2' fluorouridine
  modified_base 4: mod_base = OTHER; note = 2' O-methyl modified nucleoside - 2' O-methyluridine
  modified_base 5: mod_base = OTHER; note = 2' fluoro-modified nucleoside - 2' fluoroguanosine
  modified_base 6: mod_base = OTHER; note = 2' O-methyl modified nucleoside - 2' O-methyluridine
  modified_base 7: mod_base = OTHER; note = 2' fluoro-modified nucleoside - 2' fluoroadenosine
  modified_base 8: mod_base = OTHER; note = 2' fluoro-modified nucleoside - 2' fluoroguanosine
  modified_base 9: mod_base = OTHER; note = 2' fluoro-modified nucleoside - 2' fluorocytidine
  modified_base 10: mod_base = OTHER; note = 2' O-methyl modified nucleoside - 2' O-methyladenosine
  modified_base 11: mod_base = OTHER; note = 2' fluoro-modified nucleoside - 2' fluoroadenosine
  modified_base 12: mod_base = OTHER; note = 2' O-methyl modified nucleoside - 2' O-methyluridine
  modified_base 13: mod_base = OTHER; note = 2' fluoro-modified nucleoside - 2' fluorocytidine
  modified_base 14: mod_base = OTHER; note = 2' O-methyl modified nucleoside - 2' O-methylguanosine
  modified_base 15: mod_base = OTHER; note = 2' fluoro-modified nucleoside - 2' fluoroguanosine
  modified_base 16: mod_base = OTHER; note = 2' O-methyl modified nucleoside - 2' O-methylcytidine
  modified_base 17: mod_base = OTHER; note = 2' fluoro-modified nucleoside - 2' fluorocytidine
  modified_base 18: mod_base = OTHER; note = 2' O-methyl modified nucleoside - 2' O-methyladenosine
  modified_base 19: mod_base = OTHER; note = 2' fluoro-modified nucleoside - 2' fluoroadenosine phosphorothioate linkage
  modified_base 20: mod_base = OTHER; note = 2' O-methyl modified nucleoside - 2' O-methyluridine phosphorothioate linkage
  modified_base 21: mod_base = OTHER; note = 2' O-methyl modified nucleoside - 2' O-methyluridine
tcttgtagcaatcggccaatt

SEQ ID NO: 25972 - RNA, 21 nt, synthetic construct
  source 1..21: mol_type = other RNA; note = Description of Artificial Sequence: Synthetic oligonucleotide
  modified_base 1: mod_base = OTHER; note = 2' fluoro-modified nucleoside - 2' fluorouridine phosphorothioate linkage
  modified_base 2: mod_base = OTHER; note = 2' O-methyl modified nucleoside - 2' O-methyladenosine phosphorothioate linkage
  modified_base 3: mod_base = OTHER; note = 2' fluoro-modified nucleoside - 2' fluoroguanosine
  modified_base 4: mod_base = OTHER; note = 2' O-methyl modified nucleoside - 2' O-methylcytidine
  modified_base 5: mod_base = OTHER; note = 2' fluoro-modified nucleoside - 2' fluoroadenosine
  modified_base 6: mod_base = OTHER; note = 2' O-methyl modified nucleoside - 2' O-methyladenosine
  modified_base 7: mod_base = OTHER; note = 2' fluoro-modified nucleoside - 2' fluorouridine
  modified_base 8: mod_base = OTHER; note = 2' fluoro-modified nucleoside - 2' fluorocytidine
  modified_base 9: mod_base = OTHER; note = 2' fluoro-modified nucleoside - 2' fluoroguanosine
  modified_base 10: mod_base = OTHER; note = 2' O-methyl modified nucleoside - 2' O-methylguanosine
  modified_base 11: mod_base = OTHER; note = 2' fluoro-modified nucleoside - 2' fluorocytidine
  modified_base 12: mod_base = OTHER; note = 2' O-methyl modified nucleoside - 2' O-methylcytidine
  modified_base 13: mod_base = OTHER; note = 2' fluoro-modified nucleoside - 2' fluoroadenosine
  modified_base 14: mod_base = OTHER; note = 2' O-methyl modified nucleoside - 2' O-methylcytidine
  modified_base 15: mod_base = OTHER; note = 2' fluoro-modified nucleoside - 2' fluoroadenosine
  modified_base 16: mod_base = OTHER; note = 2' O-methyl modified nucleoside - 2' O-methyluridine
  modified_base 17: mod_base = OTHER; note = 2' fluoro-modified nucleoside - 2' fluorouridine
  modified_base 18: mod_base = OTHER; note = 2' O-methyl modified nucleoside - 2' O-methylguanosine
  modified_base 19: mod_base = OTHER; note = 2' fluoro-modified nucleoside - 2' fluoroadenosine phosphorothioate linkage
  modified_base 20: mod_base = OTHER; note = 2' O-methyl modified nucleoside - 2' O-methyluridine phosphorothioate linkage
  modified_base 21: mod_base = OTHER; note = 2' O-methyl modified nucleoside - 2' O-methyluridine
tagcaatcggccacattgatt

SEQ ID NO: 25973 - RNA, 21 nt, synthetic construct
  source 1..21: mol_type = other RNA; note = Description of Artificial Sequence: Synthetic oligonucleotide
  modified_base 1: mod_base = OTHER; note = 2' fluoro-modified nucleoside - 2' fluoroadenosine phosphorothioate linkage
  modified_base 2: mod_base = OTHER; note = 2' O-methyl modified nucleoside - 2' O-methylguanosine phosphorothioate linkage
  modified_base 3: mod_base = OTHER; note = 2' fluoro-modified nucleoside - 2' fluorocytidine
  modified_base 4: mod_base = OTHER; note = 2' O-methyl modified nucleoside - 2' O-methyladenosine
  modified_base 5: mod_base = OTHER; note = 2' fluoro-modified nucleoside - 2' fluoroadenosine
  modified_base 6: mod_base = OTHER; note = 2' O-methyl modified nucleoside - 2' O-methyluridine
  modified_base 7: mod_base = OTHER; note = 2' fluoro-modified nucleoside - 2' fluorocytidine
  modified_base 8: mod_base = OTHER; note = 2' fluoro-modified nucleoside - 2' fluoroguanosine
  modified_base 9: mod_base = OTHER; note = 2' fluoro-modified nucleoside - 2' fluoroguanosine
  modified_base 10: mod_base = OTHER; note = 2' O-methyl modified nucleoside - 2' O-methylcytidine
  modified_base 11: mod_base = OTHER; note = 2' fluoro-modified nucleoside - 2' fluorocytidine
  modified_base 12: mod_base = OTHER; note = 2' O-methyl modified nucleoside - 2' O-methyladenosine
  modified_base 13: mod_base = OTHER; note = 2' fluoro-modified nucleoside - 2' fluorocytidine
  modified_base 14: mod_base = OTHER; note = 2' O-methyl modified nucleoside - 2' O-methyladenosine
  modified_base 15: mod_base = OTHER; note = 2' fluoro-modified nucleoside - 2' fluorouridine
  modified_base 16: mod_base = OTHER; note = 2' O-methyl modified nucleoside - 2' O-methyluridine
  modified_base 17: mod_base = OTHER; note = 2' fluoro-modified nucleoside - 2' fluoroguanosine
  modified_base 18: mod_base = OTHER; note = 2' O-methyl modified nucleoside - 2' O-methylcytidine
  modified_base 19: mod_base = OTHER; note = 2' fluoro-modified nucleoside - 2' fluoroadenosine phosphorothioate linkage
  modified_base 20: mod_base = OTHER; note = 2' O-methyl modified nucleoside - 2' O-methyluridine phosphorothioate linkage
  modified_base 21: mod_base = OTHER; note = 2' O-methyl modified nucleoside - 2' O-methyluridine
agcaatcggccacattgcatt

SEQ ID NO: 25974 - RNA, 21 nt, synthetic construct
  source 1..21: mol_type = other RNA; note = Description of Artificial Sequence: Synthetic oligonucleotide
  modified_base 1: mod_base = OTHER; note = 2' fluoro-modified nucleoside - 2' fluoroguanosine phosphorothioate linkage
  modified_base 2: mod_base = OTHER; note = 2' O-methyl modified nucleoside - 2' O-methylcytidine phosphorothioate linkage
  modified_base 3: mod_base = OTHER; note = 2' fluoro-modified nucleoside - 2' fluoroadenosine
  modified_base 4: mod_base = OTHER; note = 2' O-methyl modified nucleoside - 2' O-methyladenosine
  modified_base 5: mod_base = OTHER; note = 2' fluoro-modified nucleoside - 2' fluorouridine
  modified_base 6: mod_base = OTHER; note = 2' O-methyl modified nucleoside - 2' O-methylcytidine
  modified_base 7: mod_base = OTHER; note = 2' fluoro-modified nucleoside - 2' fluoroguanosine
  modified_base 8: mod_base = OTHER; note = 2' fluoro-modified nucleoside - 2' fluoroguanosine
  modified_base 9: mod_base = OTHER; note = 2' fluoro-modified nucleoside - 2' fluorocytidine
  modified_base 10: mod_base = OTHER; note = 2' O-methyl modified nucleoside - 2' O-methylcytidine
  modified_base 11: mod_base = OTHER; note = 2' fluoro-modified nucleoside - 2' fluoroadenosine
  modified_base 12: mod_base = OTHER; note = 2' O-methyl modified nucleoside - 2' O-methylcytidine
  modified_base 13: mod_base = OTHER; note = 2' fluoro-modified nucleoside - 2' fluoroadenosine
  modified_base 14: mod_base = OTHER; note = 2' O-methyl modified nucleoside - 2' O-methyluridine
  modified_base 15: mod_base = OTHER; note = 2' fluoro-modified nucleoside - 2' fluorouridine
  modified_base 16: mod_base = OTHER; note = 2' O-methyl modified nucleoside - 2' O-methylguanosine
  modified_base 17: mod_base = OTHER; note = 2' fluoro-modified nucleoside - 2' fluorocytidine
  modified_base 18: mod_base = OTHER; note = 2' O-methyl modified nucleoside - 2' O-methylcytidine
  modified_base 19: mod_base = OTHER; note = 2' fluoro-modified nucleoside - 2' fluoroadenosine phosphorothioate linkage
  modified_base 20: mod_base = OTHER; note = 2' O-methyl modified nucleoside - 2' O-methyluridine phosphorothioate linkage
  modified_base 21: mod_base = OTHER; note = 2' O-methyl modified nucleoside - 2' O-methyluridine
gcaatcggccacattgccatt

SEQ ID NO: 25975 - RNA, 21 nt, synthetic construct
  source 1..21: mol_type = other RNA; note = Description of Artificial Sequence: Synthetic oligonucleotide
  modified_base 1: mod_base = OTHER; note = 2' fluoro-modified nucleoside - 2' fluorocytidine phosphorothioate linkage
  modified_base 2: mod_base = OTHER; note = 2' O-methyl modified nucleoside - 2' O-methyladenosine phosphorothioate linkage
  modified_base 3: mod_base = OTHER; note = 2' fluoro-modified nucleoside - 2' fluoroadenosine
  modified_base 4: mod_base = OTHER; note = 2' O-methyl modified nucleoside - 2' O-methyluridine
  modified_base 5: mod_base = OTHER; note = 2' fluoro-modified nucleoside - 2' fluorocytidine
  modified_base 6: mod_base = OTHER; note = 2' O-methyl modified nucleoside - 2' O-methylguanosine
  modified_base 7: mod_base = OTHER; note = 2' fluoro-modified nucleoside - 2' fluoroguanosine
  modified_base 8: mod_base = OTHER; note = 2' fluoro-modified nucleoside - 2' fluorocytidine
  modified_base 9: mod_base = OTHER; note = 2' fluoro-modified nucleoside - 2' fluorocytidine
  modified_base 10: mod_base = OTHER; note = 2' O-methyl modified nucleoside - 2' O-methyladenosine
  modified_base 11: mod_base = OTHER; note = 2' fluoro-modified nucleoside - 2' fluorocytidine
  modified_base 12: mod_base = OTHER; note = 2' O-methyl modified nucleoside - 2' O-methyladenosine
  modified_base 13: mod_base = OTHER; note = 2' fluoro-modified nucleoside - 2' fluorouridine
  modified_base 14: mod_base = OTHER; note = 2' O-methyl modified nucleoside - 2' O-methyluridine
  modified_base 15: mod_base = OTHER; note = 2' fluoro-modified nucleoside - 2' fluoroguanosine
  modified_base 16: mod_base = OTHER; note = 2' O-methyl modified nucleoside - 2' O-methylcytidine
  modified_base 17: mod_base = OTHER; note = 2' fluoro-modified nucleoside - 2' fluorocytidine
  modified_base 18: mod_base = OTHER; note = 2' O-methyl modified nucleoside - 2' O-methyluridine
  modified_base 19: mod_base = OTHER; note = 2' fluoro-modified nucleoside - 2' fluoroadenosine phosphorothioate linkage
  modified_base 20: mod_base = OTHER; note = 2' O-methyl modified nucleoside - 2' O-methyluridine phosphorothioate linkage
  modified_base 21: mod_base = OTHER; note = 2' O-methyl modified nucleoside - 2' O-methyluridine
caatcggccacattgcctatt

SEQ ID NO: 25976 - RNA, 21 nt, synthetic construct
  source 1..21: mol_type = other RNA; note = Description of Artificial Sequence: Synthetic oligonucleotide
  modified_base 1: mod_base = OTHER; note = 2' fluoro-modified nucleoside - 2' fluoroadenosine phosphorothioate linkage
  modified_base 2: mod_base = OTHER; note = 2' O-methyl modified nucleoside - 2' O-methyluridine phosphorothioate linkage
  modified_base 3: mod_base = OTHER; note = 2' fluoro-modified nucleoside - 2' fluorocytidine
  modified_base 4: mod_base = OTHER; note = 2' O-methyl modified nucleoside - 2' O-methylguanosine
  modified_base 5: mod_base = OTHER; note = 2' fluoro-modified nucleoside - 2' fluoroguanosine
  modified_base 6: mod_base = OTHER; note = 2' O-methyl modified nucleoside - 2' O-methylcytidine
  modified_base 7: mod_base = OTHER; note = 2' fluoro-modified nucleoside - 2' fluorocytidine
  modified_base 8: mod_base = OTHER; note = 2' fluoro-modified nucleoside - 2' fluoroadenosine
  modified_base 9: mod_base = OTHER; note = 2' fluoro-modified nucleoside - 2' fluorocytidine
  modified_base 10: mod_base = OTHER; note = 2' O-methyl modified nucleoside - 2' O-methyladenosine
  modified_base 11: mod_base = OTHER; note = 2' fluoro-modified nucleoside - 2' fluorouridine
  modified_base 12: mod_base = OTHER; note = 2' O-methyl modified nucleoside - 2' O-methyluridine
  modified_base 13: mod_base = OTHER; note = 2' fluoro-modified nucleoside - 2' fluoroguanosine
  modified_base 14: mod_base = OTHER; note = 2' O-methyl modified nucleoside - 2' O-methylcytidine
  modified_base 15: mod_base = OTHER; note = 2' fluoro-modified nucleoside - 2' fluorocytidine
  modified_base 16: mod_base = OTHER; note = 2' O-methyl modified nucleoside - 2' O-methyluridine
  modified_base 17: mod_base = OTHER; note = 2' fluoro-modified nucleoside - 2' fluorouridine
  modified_base 18: mod_base = OTHER; note = 2' O-methyl modified nucleoside - 2' O-methyladenosine
  modified_base 19: mod_base = OTHER; note = 2' fluoro-modified nucleoside - 2' fluoroadenosine phosphorothioate linkage
  modified_base 20: mod_base = OTHER; note = 2' O-methyl modified nucleoside - 2' O-methyluridine phosphorothioate linkage
  modified_base 21: mod_base = OTHER; note = 2' O-methyl modified nucleoside - 2' O-methyluridine
atcggccacattgccttaatt

SEQ ID NO: 25977 - RNA, 21 nt, synthetic construct
  source 1..21: mol_type = other RNA; note = Description of Artificial Sequence: Synthetic oligonucleotide
  modified_base 1: mod_base = OTHER; note = 2' fluoro-modified nucleoside - 2' fluorocytidine phosphorothioate linkage
  modified_base 2: mod_base = OTHER; note = 2' O-methyl modified nucleoside - 2' O-methylguanosine phosphorothioate linkage
  modified_base 3: mod_base = OTHER; note = 2' fluoro-modified nucleoside - 2' fluoroguanosine
  modified_base 4: mod_base = OTHER; note = 2' O-methyl modified nucleoside - 2' O-methylcytidine
  modified_base 5: mod_base = OTHER; note = 2' fluoro-modified nucleoside - 2' fluorocytidine
  modified_base 6: mod_base = OTHER; note = 2' O-methyl modified nucleoside - 2' O-methyladenosine
  modified_base 7: mod_base = OTHER; note = 2' fluoro-modified nucleoside - 2' fluorocytidine
  modified_base 8: mod_base = OTHER; note = 2' fluoro-modified nucleoside - 2' fluoroadenosine
  modified_base 9: mod_base = OTHER; note = 2' fluoro-modified nucleoside - 2' fluorouridine
  modified_base 10: mod_base = OTHER; note = 2' O-methyl modified nucleoside - 2' O-methyluridine
  modified_base 11: mod_base = OTHER; note = 2' fluoro-modified nucleoside - 2' fluoroguanosine
  modified_base 12: mod_base = OTHER; note = 2' O-methyl modified nucleoside - 2' O-methylcytidine
  modified_base 13: mod_base = OTHER; note = 2' fluoro-modified nucleoside - 2' fluorocytidine
  modified_base 14: mod_base = OTHER; note = 2' O-methyl modified nucleoside - 2' O-methyluridine
  modified_base 15: mod_base = OTHER; note = 2' fluoro-modified nucleoside - 2' fluorouridine
  modified_base 16: mod_base = OTHER; note = 2' O-methyl modified nucleoside - 2' O-methyladenosine
  modified_base 17: mod_base = OTHER; note = 2' fluoro-modified nucleoside - 2' fluorocytidine
  modified_base 18: mod_base = OTHER; note = 2' O-methyl modified nucleoside - 2' O-methyluridine
  modified_base 19: mod_base = OTHER; note = 2' fluoro-modified nucleoside - 2' fluoroadenosine phosphorothioate linkage
  modified_base 20: mod_base = OTHER; note = 2' O-methyl modified nucleoside - 2' O-methyluridine phosphorothioate linkage
  modified_base 21: mod_base = OTHER; note = 2' O-methyl modified nucleoside - 2' O-methyluridine
cggccacattgccttactatt

SEQ ID NO: 25978 - RNA, 21 nt, synthetic construct
  source 1..21: mol_type = other RNA; note = Description of Artificial Sequence: Synthetic oligonucleotide
  modified_base 1: mod_base = OTHER; note = 2' fluoro-modified nucleoside - 2' fluorocytidine phosphorothioate linkage
  modified_base 2: mod_base = OTHER; note = 2' O-methyl modified nucleoside - 2' O-methylcytidine phosphorothioate linkage
  modified_base 3: mod_base = OTHER; note = 2' fluoro-modified nucleoside - 2' fluoroguanosine
  modified_base 4: mod_base = OTHER; note = 2' O-methyl modified nucleoside - 2' O-methylcytidine
  modified_base 5: mod_base = OTHER; note = 2' fluoro-modified nucleoside - 2' fluoroguanosine
  modified_base 6: mod_base = OTHER; note = 2' O-methyl modified nucleoside - 2' O-methylguanosine
  modified_base 7: mod_base = OTHER; note = 2' fluoro-modified nucleoside - 2' fluorouridine
  modified_base 8: mod_base = OTHER; note = 2' fluoro-modified nucleoside - 2' fluorouridine
  modified_base 9: mod_base = OTHER; note = 2' fluoro-modified nucleoside - 2' fluoroguanosine
  modified_base 10: mod_base = OTHER; note = 2' O-methyl modified nucleoside - 2' O-methylguanosine
  modified_base 11: mod_base = OTHER; note = 2' fluoro-modified nucleoside - 2' fluorouridine
  modified_base 12: mod_base = OTHER; note = 2' O-methyl modified nucleoside - 2' O-methyluridine
  modified_base 13: mod_base = OTHER; note = 2' fluoro-modified nucleoside - 2' fluorocytidine
  modified_base 14: mod_base = OTHER; note = 2' O-methyl modified nucleoside - 2' O-methyluridine
  modified_base 15: mod_base = OTHER; note = 2' fluoro-modified nucleoside - 2' fluorouridine
  modified_base 16: mod_base = OTHER; note = 2' O-methyl modified nucleoside - 2' O-methylcytidine
  modified_base 17: mod_base = OTHER; note = 2' fluoro-modified nucleoside - 2' fluorocytidine
  modified_base 18: mod_base = OTHER; note = 2' O-methyl modified nucleoside - 2' O-methyluridine
  modified_base 19: mod_base = OTHER; note = 2' fluoro-modified nucleoside - 2' fluoroadenosine phosphorothioate linkage
  modified_base 20: mod_base = OTHER; note = 2' O-methyl modified nucleoside - 2' O-methyluridine phosphorothioate linkage
  modified_base 21: mod_base = OTHER; note = 2' O-methyl modified nucleoside - 2' O-methyluridine
ccgcggttggttcttcctatt

SEQ ID NO: 25979 - RNA, 21 nt, synthetic construct
  source 1..21: mol_type = other RNA; note = Description of Artificial Sequence: Synthetic oligonucleotide
  modified_base 1: mod_base = OTHER; note = 2' fluoro-modified nucleoside - 2' fluoroguanosine phosphorothioate linkage
  modified_base 2: mod_base = OTHER; note = 2' O-methyl modified nucleoside - 2' O-methylcytidine phosphorothioate linkage
  modified_base 3: mod_base = OTHER; note = 2' fluoro-modified nucleoside - 2' fluoroguanosine
  modified_base 4: mod_base = OTHER; note = 2' O-methyl modified nucleoside - 2' O-methylguanosine
  modified_base 5: mod_base = OTHER; note = 2' fluoro-modified nucleoside - 2' fluorouridine
  modified_base 6: mod_base = OTHER; note = 2' O-methyl modified nucleoside - 2' O-methyluridine
  modified_base 7: mod_base = OTHER; note = 2' fluoro-modified nucleoside - 2' fluoroguanosine
  modified_base 8: mod_base = OTHER; note = 2' fluoro-modified nucleoside - 2' fluoroguanosine
  modified_base 9: mod_base = OTHER; note = 2' fluoro-modified nucleoside - 2' fluorouridine
  modified_base 10: mod_base = OTHER; note = 2' O-methyl modified nucleoside - 2' O-methyluridine
  modified_base 11: mod_base = OTHER; note = 2' fluoro-modified nucleoside - 2' fluorocytidine
  modified_base 12: mod_base = OTHER; note = 2' O-methyl modified nucleoside - 2' O-methyluridine
  modified_base 13: mod_base = OTHER; note = 2' fluoro-modified nucleoside - 2' fluorouridine
  modified_base 14: mod_base = OTHER; note = 2' O-methyl modified nucleoside - 2' O-methylcytidine
  modified_base 15: mod_base = OTHER; note = 2' fluoro-modified nucleoside - 2' fluorocytidine
  modified_base 16: mod_base = OTHER; note = 2' O-methyl modified nucleoside - 2' O-methyluridine
  modified_base 17: mod_base = OTHER; note = 2' fluoro-modified nucleoside - 2' fluorouridine
  modified_base 18: mod_base = OTHER; note = 2' O-methyl modified nucleoside - 2' O-methylguanosine
  modified_base 19: mod_base = OTHER; note = 2' fluoro-modified nucleoside - 2' fluoroadenosine phosphorothioate linkage
  modified_base 20: mod_base = OTHER; note = 2' O-methyl modified nucleoside - 2' O-methyluridine phosphorothioate linkage
  modified_base 21: mod_base = OTHER; note = 2' O-methyl modified nucleoside - 2' O-methyluridine
gcggttggttcttccttgatt

SEQ ID NO: 25980 - RNA, 21 nt, synthetic construct
  source 1..21: mol_type = other RNA; note = Description of Artificial Sequence: Synthetic oligonucleotide
  modified_base 1: mod_base = OTHER; note = 2' fluoro-modified nucleoside - 2' fluoroguanosine phosphorothioate linkage
  modified_base 2: mod_base = OTHER; note = 2' O-methyl modified nucleoside - 2' O-methylguanosine phosphorothioate linkage
  modified_base 3: mod_base = OTHER; note = 2' fluoro-modified nucleoside - 2' fluorouridine
  modified_base 4: mod_base = OTHER; note = 2' O-methyl modified nucleoside - 2' O-methyluridine
  modified_base 5: mod_base = OTHER; note = 2' fluoro-modified nucleoside - 2' fluoroguanosine
  modified_base 6: mod_base = OTHER; note = 2' O-methyl modified nucleoside - 2' O-methylguanosine
  modified_base 7: mod_base = OTHER; note = 2' fluoro-modified nucleoside - 2' fluorouridine
  modified_base 8: mod_base = OTHER; note = 2' fluoro-modified nucleoside - 2' fluorouridine
  modified_base 9: mod_base = OTHER; note = 2' fluoro-modified nucleoside - 2' fluorocytidine
  modified_base 10: mod_base = OTHER; note = 2' O-methyl modified nucleoside - 2' O-methyluridine
  modified_base 11: mod_base = OTHER; note = 2' fluoro-modified nucleoside - 2' fluorouridine
  modified_base 12: mod_base = OTHER; note = 2' O-methyl modified nucleoside - 2' O-methylcytidine
  modified_base 13: mod_base = OTHER; note = 2' fluoro-modified nucleoside - 2' fluorocytidine
  modified_base 14: mod_base = OTHER; note = 2' O-methyl modified nucleoside - 2' O-methyluridine
  modified_base 15: mod_base = OTHER; note = 2' fluoro-modified nucleoside - 2' fluorouridine
  modified_base 16: mod_base = OTHER; note = 2' O-methyl modified nucleoside - 2' O-methylguanosine
  modified_base 17: mod_base = OTHER; note = 2' fluoro-modified nucleoside - 2' fluorocytidine
  modified_base 18: mod_base = OTHER; note = 2' O-methyl modified nucleoside - 2' O-methyluridine
  modified_base 19: mod_base = OTHER; note = 2' fluoro-modified nucleoside - 2' fluoroadenosine phosphorothioate linkage
  modified_base 20: mod_base = OTHER; note = 2' O-methyl modified nucleoside - 2' O-methyluridine phosphorothioate linkage
  modified_base 21: mod_base = OTHER; note = 2' O-methyl modified nucleoside - 2' O-methyluridine
ggttggttcttccttgctatt

SEQ ID NO: 25981 - RNA, 21 nt, synthetic construct
  source 1..21: mol_type = other RNA; note = Description of Artificial Sequence: Synthetic oligonucleotide
  modified_base 1: mod_base = OTHER; note = 2' fluoro-modified nucleoside - 2' fluorocytidine phosphorothioate linkage
  modified_base 2: mod_base = OTHER; note = 2' O-methyl modified nucleoside - 2' O-methyluridine phosphorothioate linkage
  modified_base 3: mod_base = OTHER; note = 2' fluoro-modified nucleoside - 2' fluorouridine
  modified_base 4: mod_base = OTHER; note = 2' O-methyl modified nucleoside - 2' O-methylcytidine
  modified_base 5: mod_base = OTHER; note = 2' fluoro-modified nucleoside - 2' fluorocytidine
  modified_base 6: mod_base = OTHER; note = 2' O-methyl modified nucleoside - 2' O-methyluridine
  modified_base 7: mod_base = OTHER; note = 2' fluoro-modified nucleoside - 2' fluorouridine
  modified_base 8: mod_base = OTHER; note = 2' fluoro-modified nucleoside - 2' fluoroguanosine
  modified_base 9: mod_base = OTHER; note = 2' fluoro-modified nucleoside - 2' fluorocytidine
  modified_base 10: mod_base = OTHER; note = 2' O-methyl modified nucleoside - 2' O-methyluridine
  modified_base 11: mod_base = OTHER; note = 2' fluoro-modified nucleoside - 2' fluorocytidine
  modified_base 12: mod_base = OTHER; note = 2' O-methyl modified nucleoside - 2' O-methyluridine
  modified_base 13: mod_base = OTHER; note = 2' fluoro-modified nucleoside - 2' fluoroadenosine
  modified_base 14: mod_base = OTHER; note = 2' O-methyl modified nucleoside - 2' O-methylcytidine
  modified_base 15: mod_base = OTHER; note = 2' fluoro-modified nucleoside - 2' fluorouridine
  modified_base 16: mod_base = OTHER; note = 2' O-methyl modified nucleoside - 2' O-methylcytidine
  modified_base 17: mod_base = OTHER; note = 2' fluoro-modified nucleoside - 2' fluoroadenosine
  modified_base 18: mod_base = OTHER; note = 2' O-methyl modified nucleoside - 2' O-methyladenosine
  modified_base 19: mod_base = OTHER; note = 2' fluoro-modified nucleoside - 2' fluoroadenosine phosphorothioate linkage
  modified_base 20: mod_base = OTHER; note = 2' O-methyl modified nucleoside - 2' O-methyluridine phosphorothioate linkage
  modified_base 21: mod_base = OTHER; note = 2' O-methyl modified nucleoside - 2' O-methyluridine
cttccttgctctactcaaatt

SEQ ID NO: 25982 - RNA, 21 nt, synthetic construct
  source 1..21: mol_type = other RNA; note = Description of Artificial Sequence: Synthetic oligonucleotide
  modified_base 1: mod_base = OTHER; note = 2' fluoro-modified nucleoside - 2' fluorocytidine phosphorothioate linkage
  modified_base 2: mod_base = OTHER; note = 2' O-methyl modified nucleoside - 2' O-methyluridine phosphorothioate linkage
  modified_base 3: mod_base = OTHER; note = 2' fluoro-modified nucleoside - 2' fluorouridine
  modified_base 4: mod_base = OTHER; note = 2' O-methyl modified nucleoside - 2' O-methylcytidine
  modified_base 5: mod_base = OTHER; note = 2' fluoro-modified nucleoside - 2' fluorouridine
  modified_base 6: mod_base = OTHER; note = 2' O-methyl modified nucleoside - 2' O-methylcytidine
  modified_base 7: mod_base = OTHER; note = 2' fluoro-modified nucleoside - 2' fluorouridine
  modified_base 8: mod_base = OTHER; note = 2' fluoro-modified nucleoside - 2' fluorocytidine
  modified_base 9: mod_base = OTHER; note = 2' fluoro-modified nucleoside - 2' fluorouridine
  modified_base 10: mod_base = OTHER; note = 2' O-methyl modified nucleoside - 2' O-methylguanosine
  modified_base 11: mod_base = OTHER; note = 2' fluoro-modified nucleoside - 2' fluoroadenosine
  modified_base 12: mod_base = OTHER; note = 2' O-methyl modified nucleoside - 2' O-methylcytidine
  modified_base 13: mod_base = OTHER; note = 2' fluoro-modified nucleoside - 2' fluorouridine
  modified_base 14: mod_base = OTHER; note = 2' O-methyl modified nucleoside - 2' O-methylcytidine
  modified_base 15: mod_base = OTHER; note = 2' fluoro-modified nucleoside - 2' fluorouridine
  modified_base 16: mod_base = OTHER; note = 2' O-methyl modified nucleoside - 2' O-methylcytidine
  modified_base 17: mod_base = OTHER; note = 2' fluoro-modified nucleoside - 2' fluoroguanosine
  modified_base 18: mod_base = OTHER; note = 2' O-methyl modified nucleoside - 2' O-methyladenosine
  modified_base 19: mod_base = OTHER; note = 2' fluoro-modified nucleoside - 2' fluoroadenosine phosphorothioate linkage
  modified_base 20: mod_base = OTHER; note = 2' O-methyl modified nucleoside - 2' O-methyluridine phosphorothioate linkage
  modified_base 21: mod_base = OTHER; note = 2' O-methyl modified nucleoside - 2' O-methyluridine
cttctctctgactctcgaatt

SEQ ID NO: 25983 - RNA, 21 nt, synthetic construct
  source 1..21: mol_type = other RNA; note = Description of Artificial Sequence: Synthetic oligonucleotide
  modified_base 1: mod_base = OTHER; note = 2' fluoro-modified nucleoside - 2' fluorocytidine phosphorothioate linkage
  modified_base 2: mod_base = OTHER; note = 2' O-methyl modified nucleoside - 2' O-methyluridine phosphorothioate linkage
  modified_base 3: mod_base = OTHER; note = 2' fluoro-modified nucleoside - 2' fluorocytidine
  modified_base 4: mod_base = OTHER; note = 2' O-methyl modified nucleoside - 2' O-methyluridine
  modified_base 5: mod_base = OTHER; note = 2' fluoro-modified nucleoside - 2' fluoroguanosine
  modified_base 6: mod_base = OTHER; note = 2' O-methyl modified nucleoside - 2' O-methyladenosine
  modified_base 7: mod_base = OTHER; note = 2' fluoro-modified nucleoside - 2' fluorocytidine
  modified_base 8: mod_base = OTHER; note = 2' fluoro-modified nucleoside - 2' fluorouridine
  modified_base 9: mod_base = OTHER; note = 2' fluoro-modified nucleoside - 2' fluorocytidine
  modified_base 10: mod_base = OTHER; note = 2' O-methyl modified nucleoside - 2' O-methyluridine
  modified_base 11: mod_base = OTHER; note = 2' fluoro-modified nucleoside - 2' fluorocytidine
  modified_base 12: mod_base = OTHER; note = 2' O-methyl modified nucleoside - 2' O-methylguanosine
  modified_base 13: mod_base = OTHER; note = 2' fluoro-modified nucleoside - 2' fluoroadenosine
  modified_base 14: mod_base = OTHER; note = 2' O-methyl modified nucleoside - 2' O-methylcytidine
  modified_base 15: mod_base = OTHER; note = 2' fluoro-modified nucleoside - 2' fluorouridine
  modified_base 16: mod_base = OTHER; note = 2' O-methyl modified nucleoside - 2' O-methyluridine
  modified_base 17: mod_base = OTHER; note = 2' fluoro-modified nucleoside - 2' fluoroguanosine
  modified_base 18: mod_base = OTHER; note = 2' O-methyl modified nucleoside - 2' O-methyluridine
  modified_base 19: mod_base = OTHER; note = 2' fluoro-modified nucleoside - 2' fluoroadenosine phosphorothioate linkage
  modified_base 20: mod_base = OTHER; note = 2' O-methyl modified nucleoside - 2' O-methyluridine phosphorothioate linkage
  modified_base 21: mod_base = OTHER; note = 2' O-methyl modified nucleoside - 2' O-methyluridine
ctctgactctcgacttgtatt

SEQ ID NO: 25984 - RNA, 21 nt, synthetic construct
  source 1..21: mol_type = other RNA; note = Description of Artificial Sequence: Synthetic oligonucleotide
  modified_base 1: mod_base = OTHER; note = 2' fluoro-modified nucleoside - 2' fluorocytidine phosphorothioate linkage
  modified_base 2: mod_base = OTHER; note = 2' O-methyl modified nucleoside - 2' O-methyluridine phosphorothioate linkage
  modified_base 3: mod_base = OTHER; note = 2' fluoro-modified nucleoside - 2' fluoroguanosine
  modified_base 4: mod_base = OTHER; note = 2' O-methyl modified nucleoside - 2' O-methyladenosine
  modified_base 5: mod_base = OTHER; note = 2' fluoro-modified nucleoside - 2' fluorocytidine
  modified_base 6: mod_base = OTHER; note = 2' O-methyl modified nucleoside - 2' O-methyluridine
  modified_base 7: mod_base = OTHER; note = 2' fluoro-modified nucleoside - 2' fluorocytidine
  modified_base 8: mod_base = OTHER; note = 2' fluoro-modified nucleoside - 2' fluorouridine
  modified_base 9: mod_base = OTHER; note = 2' fluoro-modified nucleoside - 2' fluorocytidine
  modified_base 10: mod_base = OTHER; note = 2' O-methyl modified nucleoside - 2' O-methylguanosine
  modified_base 11: mod_base = OTHER; note = 2' fluoro-modified nucleoside - 2' fluoroadenosine
  modified_base 12: mod_base = OTHER; note = 2' O-methyl modified nucleoside - 2' O-methylcytidine
  modified_base 13: mod_base = OTHER; note = 2' fluoro-modified nucleoside - 2' fluorouridine
  modified_base 14: mod_base = OTHER; note = 2' O-methyl modified nucleoside - 2' O-methyluridine
  modified_base 15: mod_base = OTHER; note = 2' fluoro-modified nucleoside - 2' fluoroguanosine
  modified_base 16: mod_base = OTHER; note = 2' O-methyl modified nucleoside - 2' O-methyluridine
  modified_base 17: mod_base = OTHER; note = 2' fluoro-modified nucleoside - 2' fluoroguanosine
  modified_base 18: mod_base = OTHER; note = 2' O-methyl modified nucleoside - 2' O-methyluridine
  modified_base 19: mod_base = OTHER; note = 2' fluoro-modified nucleoside - 2' fluoroadenosine phosphorothioate linkage
  modified_base 20: mod_base = OTHER; note = 2' O-methyl modified nucleoside - 2' O-methyluridine phosphorothioate linkage
  modified_base 21: mod_base = OTHER; note = 2' O-methyl modified nucleoside - 2' O-methyluridine
ctgactctcgacttgtgtatt

SEQ ID NO: 25985 - RNA, 21 nt, synthetic construct
  source 1..21: mol_type = other RNA; note = Description of Artificial Sequence: Synthetic oligonucleotide
  modified_base 1: mod_base = OTHER; note = 2' fluoro-modified nucleoside - 2' fluorouridine phosphorothioate linkage
  modified_base 2: mod_base = OTHER; note = 2' O-methyl modified nucleoside - 2' O-methylguanosine phosphorothioate linkage
  modified_base 3: mod_base = OTHER; note = 2' fluoro-modified nucleoside - 2' fluoroadenosine
  modified_base 4: mod_base = OTHER; note = 2' O-methyl modified nucleoside - 2' O-methylcytidine
  modified_base 5: mod_base = OTHER; note = 2' fluoro-modified nucleoside - 2' fluorouridine
  modified_base 6: mod_base = OTHER; note = 2' O-methyl modified nucleoside - 2' O-methylcytidine
  modified_base 7: mod_base = OTHER; note = 2' fluoro-modified nucleoside - 2' fluorouridine
  modified_base 8: mod_base = OTHER; note = 2' fluoro-modified nucleoside - 2' fluorocytidine
  modified_base 9: mod_base = OTHER; note = 2' fluoro-modified nucleoside - 2' fluoroguanosine
  modified_base 10: mod_base = OTHER; note = 2' O-methyl modified nucleoside - 2' O-methyladenosine
  modified_base 11: mod_base = OTHER; note = 2' fluoro-modified nucleoside - 2' fluorocytidine
  modified_base 12: mod_base = OTHER; note = 2' O-methyl modified nucleoside - 2' O-methyluridine
  modified_base 13: mod_base = OTHER; note = 2' fluoro-modified nucleoside - 2' fluorouridine
  modified_base 14: mod_base = OTHER; note = 2' O-methyl modified nucleoside - 2' O-methylguanosine
  modified_base 15: mod_base = OTHER; note = 2' fluoro-modified nucleoside - 2' fluorouridine
  modified_base 16: mod_base = OTHER; note = 2' O-methyl modified nucleoside - 2' O-methylguanosine
  modified_base 17: mod_base = OTHER; note = 2' fluoro-modified nucleoside - 2' fluorouridine
  modified_base 18: mod_base = OTHER; note = 2' O-methyl modified nucleoside - 2' O-methyluridine
  modified_base 19: mod_base = OTHER; note = 2' fluoro-modified nucleoside - 2' fluoroadenosine phosphorothioate linkage
  modified_base 20: mod_base = OTHER; note = 2' O-methyl modified nucleoside - 2' O-methyluridine phosphorothioate linkage
  modified_base 21: mod_base = OTHER; note = 2' O-methyl modified nucleoside - 2' O-methyluridine
tgactctcgacttgtgttatt

SEQ ID NO: 25986 - RNA, 21 nt, synthetic construct
  source 1..21: mol_type = other RNA; note = Description of Artificial Sequence: Synthetic oligonucleotide
  modified_base 1: mod_base = OTHER; note = 2' fluoro-modified nucleoside - 2' fluoroadenosine phosphorothioate linkage
  modified_base 2: mod_base = OTHER; note = 2' O-methyl modified nucleoside - 2' O-methylcytidine phosphorothioate linkage
  modified_base 3: mod_base = OTHER; note = 2' fluoro-modified nucleoside - 2' fluorouridine
  modified_base 4: mod_base = OTHER; note = 2' O-methyl modified nucleoside - 2' O-methylcytidine
  modified_base 5: mod_base = OTHER; note = 2' fluoro-modified nucleoside - 2' fluorouridine
  modified_base 6: mod_base = OTHER; note = 2' O-methyl modified nucleoside - 2' O-methylcytidine
  modified_base 7: mod_base = OTHER; note = 2' fluoro-modified nucleoside - 2' fluoroguanosine
  modified_base 8: mod_base = OTHER; note = 2' fluoro-modified nucleoside - 2' fluoroadenosine
  modified_base 9: mod_base = OTHER; note = 2' fluoro-modified nucleoside - 2' fluorocytidine
  modified_base 10: mod_base = OTHER; note = 2' O-methyl modified nucleoside - 2' O-methyluridine
  modified_base 11: mod_base = OTHER; note = 2' fluoro-modified nucleoside - 2' fluorouridine
  modified_base 12: mod_base = OTHER; note = 2' O-methyl modified nucleoside - 2' O-methylguanosine
  modified_base 13: mod_base = OTHER; note = 2' fluoro-modified nucleoside - 2' fluorouridine
  modified_base 14: mod_base = OTHER; note = 2' O-methyl modified nucleoside - 2' O-methylguanosine
  modified_base 15: mod_base = OTHER; note = 2' fluoro-modified nucleoside - 2' fluorouridine
  modified_base 16: mod_base = OTHER; note = 2' O-methyl modified nucleoside - 2' O-methyluridine
  modified_base 17: mod_base = OTHER; note = 2' fluoro-modified nucleoside - 2' fluorocytidine
  modified_base 18: mod_base = OTHER; note = 2' O-methyl modified nucleoside - 2' O-methylcytidine
  modified_base 19: mod_base = OTHER; note = 2' fluoro-modified nucleoside - 2' fluoroadenosine phosphorothioate linkage
  modified_base 20: mod_base = OTHER; note = 2' O-methyl modified nucleoside - 2' O-methyluridine phosphorothioate linkage
  modified_base 21: mod_base = OTHER; note = 2' O-methyl modified nucleoside - 2' O-methyluridine
actctcgacttgtgttccatt

SEQ ID NO: 25987 - RNA, 21 nt, synthetic construct
  source 1..21: mol_type = other RNA; note = Description of Artificial Sequence: Synthetic oligonucleotide
  modified_base 1: mod_base = OTHER; note = 2' fluoro-modified nucleoside - 2' fluorouridine phosphorothioate linkage
  modified_base 2: mod_base = OTHER; note = 2' O-methyl modified nucleoside - 2' O-methylcytidine phosphorothioate linkage
  modified_base 3: mod_base = OTHER; note = 2' fluoro-modified nucleoside - 2' fluorouridine
  modified_base 4: mod_base = OTHER; note = 2' O-methyl modified nucleoside - 2' O-methylcytidine
  modified_base 5: mod_base = OTHER; note = 2' fluoro-modified nucleoside - 2' fluoroguanosine
  modified_base 6: mod_base = OTHER; note = 2' O-methyl modified nucleoside - 2' O-methyladenosine
  modified_base 7: mod_base = OTHER; note = 2' fluoro-modified nucleoside - 2' fluorocytidine
  modified_base 8: mod_base = OTHER; note = 2' fluoro-modified nucleoside - 2' fluorouridine
  modified_base 9: mod_base = OTHER; note = 2' fluoro-modified nucleoside - 2' fluorouridine
  modified_base 10: mod_base = OTHER; note = 2' O-methyl modified nucleoside - 2' O-methylguanosine
  modified_base 11: mod_base = OTHER; note = 2' fluoro-modified nucleoside - 2' fluorouridine
  modified_base 12: mod_base = OTHER; note = 2' O-methyl modified nucleoside - 2' O-methylguanosine
  modified_base 13: mod_base = OTHER; note = 2' fluoro-modified nucleoside - 2' fluorouridine
  modified_base 14: mod_base = OTHER; note = 2' O-methyl modified nucleoside - 2' O-methyluridine
  modified_base 15: mod_base = OTHER; note = 2' fluoro-modified nucleoside - 2' fluorocytidine
  modified_base 16: mod_base = OTHER; note = 2' O-methyl modified nucleoside - 2' O-methylcytidine
  modified_base 17: mod_base = OTHER; note = 2' fluoro-modified nucleoside - 2' fluorocytidine
  modified_base 18: mod_base = OTHER; note = 2' O-methyl modified nucleoside - 2' O-methylcytidine
  modified_base 19: mod_base = OTHER; note = 2' fluoro-modified nucleoside - 2' fluoroadenosine phosphorothioate linkage
  modified_base 20: mod_base = OTHER; note = 2' O-methyl modified nucleoside - 2' O-methyluridine phosphorothioate linkage
  modified_base 21: mod_base = OTHER; note = 2' O-methyl modified nucleoside - 2' O-methyluridine
tctcgacttgtgttccccatt

SEQ ID NO: 25988 - RNA, 21 nt, synthetic construct
  source 1..21: mol_type = other RNA; note = Description of Artificial Sequence: Synthetic oligonucleotide
  modified_base 1: mod_base = OTHER; note = 2' fluoro-modified nucleoside - 2' fluorocytidine phosphorothioate linkage
  modified_base 2: mod_base = OTHER; note = 2' O-methyl modified nucleoside - 2' O-methyluridine phosphorothioate linkage
  modified_base 3: mod_base = OTHER; note = 2' fluoro-modified nucleoside - 2' fluorocytidine
  modified_base 4: mod_base = OTHER; note = 2' O-methyl modified nucleoside - 2' O-methylguanosine
  modified_base 5: mod_base = OTHER; note = 2' fluoro-modified nucleoside - 2' fluoroadenosine
  modified_base 6: mod_base = OTHER; note = 2' O-methyl modified nucleoside - 2' O-methylcytidine
  modified_base 7: mod_base = OTHER; note = 2' fluoro-modified nucleoside - 2' fluorouridine
  modified_base 8: mod_base = OTHER; note = 2' fluoro-modified nucleoside - 2' fluorouridine
  modified_base 9: mod_base = OTHER; note = 2' fluoro-modified nucleoside - 2' fluoroguanosine
  modified_base 10: mod_base = OTHER; note = 2' O-methyl modified nucleoside - 2' O-methyluridine
  modified_base 11: mod_base = OTHER; note = 2' fluoro-modified nucleoside - 2' fluoroguanosine
  modified_base 12: mod_base = OTHER; note = 2' O-methyl modified nucleoside - 2' O-methyluridine
  modified_base 13: mod_base = OTHER; note = 2' fluoro-modified nucleoside - 2' fluorouridine
  modified_base 14: mod_base = OTHER; note = 2' O-methyl modified nucleoside - 2' O-methylcytidine
  modified_base 15: mod_base = OTHER; note = 2' fluoro-modified nucleoside - 2' fluorocytidine
  modified_base 16: mod_base = OTHER; note = 2' O-methyl modified nucleoside - 2' O-methylcytidine
  modified_base 17: mod_base = OTHER; note = 2' fluoro-modified nucleoside - 2' fluorocytidine
  modified_base 18: mod_base = OTHER; note = 2' O-methyl modified nucleoside - 2' O-methylguanosine
  modified_base 19: mod_base = OTHER; note = 2' fluoro-modified nucleoside - 2' fluoroadenosine phosphorothioate linkage
  modified_base 20: mod_base = OTHER; note = 2' O-methyl modified nucleoside - 2' O-methyluridine phosphorothioate linkage
  modified_base 21: mod_base = OTHER; note = 2' O-methyl modified nucleoside - 2' O-methyluridine
ctcgacttgtgttccccgatt

SEQ ID NO: 25989 - RNA, 21 nt, synthetic construct
  source 1..21: mol_type = other RNA; note = Description of Artificial Sequence: Synthetic oligonucleotide
  modified_base 1: mod_base = OTHER; note = 2' fluoro-modified nucleoside - 2' fluorouridine phosphorothioate linkage
  modified_base 2: mod_base = OTHER; note = 2' O-methyl modified nucleoside - 2' O-methylcytidine phosphorothioate linkage
  modified_base 3: mod_base = OTHER; note = 2' fluoro-modified nucleoside - 2' fluoroguanosine
  modified_base 4: mod_base = OTHER; note = 2' O-methyl modified nucleoside - 2' O-methyladenosine
  modified_base 5: mod_base = OTHER; note = 2' fluoro-modified nucleoside - 2' fluorocytidine
  modified_base 6: mod_base = OTHER; note = 2' O-methyl modified nucleoside - 2' O-methyluridine
  modified_base 7: mod_base = OTHER; note = 2' fluoro-modified nucleoside - 2' fluorouridine
  modified_base 8: mod_base = OTHER; note = 2' fluoro-modified nucleoside - 2' fluoroguanosine
  modified_base 9: mod_base = OTHER; note = 2' fluoro-modified nucleoside - 2' fluorouridine
  modified_base 10: mod_base = OTHER; note = 2' O-methyl modified nucleoside - 2' O-methylguanosine
  modified_base 11: mod_base = OTHER; note = 2' fluoro-modified nucleoside - 2' fluorouridine
  modified_base 12: mod_base = OTHER; note = 2' O-methyl modified nucleoside - 2' O-methyluridine
  modified_base 13: mod_base = OTHER; note = 2' fluoro-modified nucleoside - 2' fluorocytidine
  modified_base 14: mod_base = OTHER; note = 2' O-methyl modified nucleoside - 2' O-methylcytidine
  modified_base 15: mod_base = OTHER; note = 2' fluoro-modified nucleoside - 2' fluorocytidine
  modified_base 16: mod_base = OTHER; note = 2' O-methyl modified nucleoside - 2' O-methylcytidine
  modified_base 17: mod_base = OTHER; note = 2' fluoro-modified nucleoside - 2' fluoroguanosine
  modified_base 18: mod_base = OTHER; note = 2' O-methyl modified nucleoside - 2' O-methylcytidine
  modified_base 19: mod_base = OTHER; note = 2' fluoro-modified nucleoside - 2' fluoroadenosine phosphorothioate linkage
  modified_base 20: mod_base = OTHER; note = 2' O-methyl modified nucleoside - 2' O-methyluridine phosphorothioate linkage
  modified_base 21: mod_base = OTHER; note = 2' O-methyl modified nucleoside - 2' O-methyluridine
tcgacttgtgttccccgcatt

SEQ ID NO: 25990 - RNA, 21 nt, synthetic construct
  source 1..21: mol_type = other RNA; note = Description of Artificial Sequence: Synthetic oligonucleotide
  modified_base 1: mod_base = OTHER; note = 2' fluoro-modified nucleoside - 2' fluorocytidine phosphorothioate linkage
  modified_base 2: mod_base = OTHER; note = 2' O-methyl modified nucleoside - 2' O-methylguanosine phosphorothioate linkage
  modified_base 3: mod_base = OTHER; note = 2' fluoro-modified nucleoside - 2' fluoroadenosine
  modified_base 4: mod_base = OTHER; note = 2' O-methyl modified nucleoside - 2' O-methylcytidine
  modified_base 5: mod_base = OTHER; note = 2' fluoro-modified nucleoside - 2' fluorouridine
  modified_base 6: mod_base = OTHER; note = 2' O-methyl modified nucleoside - 2' O-methyluridine
  modified_base 7: mod_base = OTHER; note = 2' fluoro-modified nucleoside - 2' fluoroguanosine
  modified_base 8: mod_base = OTHER; note = 2' fluoro-modified nucleoside - 2' fluorouridine
  modified_base 9: mod_base = OTHER; note = 2' fluoro-modified nucleoside - 2' fluoroguanosine
  modified_base 10: mod_base = OTHER; note = 2' O-methyl modified nucleoside - 2' O-methyluridine
  modified_base 11: mod_base = OTHER; note = 2' fluoro-modified nucleoside - 2' fluorouridine
  modified_base 12: mod_base = OTHER; note = 2' O-methyl modified nucleoside - 2' O-methylcytidine
  modified_base 13: mod_base = OTHER; note = 2' fluoro-modified nucleoside - 2' fluorocytidine
  modified_base 14: mod_base = OTHER; note = 2' O-methyl modified nucleoside - 2' O-methylcytidine
  modified_base 15: mod_base = OTHER; note = 2' fluoro-modified nucleoside - 2' fluorocytidine
  modified_base 16: mod_base = OTHER; note = 2' O-methyl modified nucleoside - 2' O-methylguanosine
  modified_base 17: mod_base = OTHER; note = 2' fluoro-modified nucleoside - 2' fluorocytidine
  modified_base 18: mod_base = OTHER; note = 2' O-methyl modified nucleoside - 2' O-methyluridine
  modified_base 19: mod_base = OTHER; note = 2' fluoro-modified nucleoside - 2' fluoroadenosine phosphorothioate linkage
  modified_base 20: mod_base = OTHER; note = 2' O-methyl modified nucleoside - 2' O-methyluridine phosphorothioate linkage
  modified_base 21: mod_base = OTHER; note = 2' O-methyl modified nucleoside - 2' O-methyluridine
cgacttgtgttccccgctatt

SEQ ID NO: 25991 - RNA, 21 nt, synthetic construct
  source 1..21: mol_type = other RNA; note = Description of Artificial Sequence: Synthetic oligonucleotide
  modified_base 1: mod_base = OTHER; note = 2' fluoro-modified nucleoside - 2' fluoroguanosine phosphorothioate linkage
  modified_base 2: mod_base = OTHER; note = 2' O-methyl modified nucleoside - 2' O-methyladenosine phosphorothioate linkage
  modified_base 3: mod_base = OTHER; note = 2' fluoro-modified nucleoside - 2' fluorocytidine
  modified_base 4: mod_base = OTHER; note = 2' O-methyl modified nucleoside - 2' O-methyluridine
  modified_base 5: mod_base = OTHER; note = 2' fluoro-modified nucleoside - 2' fluorouridine
  modified_base 6: mod_base = OTHER; note = 2' O-methyl modified nucleoside - 2' O-methylguanosine
  modified_base 7: mod_base = OTHER; note = 2' fluoro-modified nucleoside - 2' fluorouridine
  modified_base 8: mod_base = OTHER; note = 2' fluoro-modified nucleoside - 2' fluoroguanosine
  modified_base 9: mod_base = OTHER; note = 2' fluoro-modified nucleoside - 2' fluorouridine
  modified_base 10: mod_base = OTHER; note = 2' O-methyl modified nucleoside - 2' O-methyluridine
  modified_base 11: mod_base = OTHER; note = 2' fluoro-modified nucleoside - 2' fluorocytidine
  modified_base 12: mod_base = OTHER; note = 2' O-methyl modified nucleoside - 2' O-methylcytidine
  modified_base 13: mod_base = OTHER; note = 2' fluoro-modified nucleoside - 2' fluorocytidine
  modified_base 14: mod_base = OTHER; note = 2' O-methyl modified nucleoside - 2' O-methylcytidine
  modified_base 15: mod_base = OTHER; note = 2' fluoro-modified nucleoside - 2' fluoroguanosine
  modified_base 16: mod_base = OTHER; note = 2' O-methyl modified nucleoside - 2' O-methylcytidine
  modified_base 17: mod_base = OTHER; note = 2' fluoro-modified nucleoside - 2' fluorouridine
  modified_base 18: mod_base = OTHER; note = 2' O-methyl modified nucleoside - 2' O-methylcytidine
  modified_base 19: mod_base = OTHER; note = 2' fluoro-modified nucleoside - 2' fluoroadenosine phosphorothioate linkage
  modified_base 20: mod_base = OTHER; note = 2' O-methyl modified nucleoside - 2' O-methyluridine phosphorothioate linkage
  modified_base 21: mod_base = OTHER; note = 2' O-methyl modified nucleoside - 2' O-methyluridine
gacttgtgttccccgctcatt

SEQ ID NO: 25992 - RNA, 21 nt, synthetic construct
  source 1..21: mol_type = other RNA; note = Description of Artificial Sequence: Synthetic oligonucleotide
  modified_base 1: mod_base = OTHER; note = 2' fluoro-modified nucleoside - 2' fluoroadenosine phosphorothioate linkage
  modified_base 2: mod_base = OTHER; note = 2' O-methyl modified nucleoside - 2' O-methylcytidine phosphorothioate linkage
  modified_base 3: mod_base = OTHER; note = 2' fluoro-modified nucleoside - 2' fluorouridine
  modified_base 4: mod_base = OTHER; note = 2' O-methyl modified nucleoside - 2' O-methyluridine
  modified_base 5: mod_base = OTHER; note = 2' fluoro-modified nucleoside - 2' fluoroguanosine
  modified_base 6: mod_base = OTHER; note = 2' O-methyl modified nucleoside - 2' O-methyluridine
  modified_base 7: mod_base = OTHER; note = 2' fluoro-modified nucleoside - 2' fluoroguanosine
  modified_base 8: mod_base = OTHER; note = 2' fluoro-modified nucleoside - 2' fluorouridine
  modified_base 9: mod_base = OTHER; note = 2' fluoro-modified nucleoside - 2' fluorouridine
  modified_base 10: mod_base = OTHER; note = 2' O-methyl modified nucleoside - 2' O-methylcytidine
  modified_base 11: mod_base = OTHER; note = 2' fluoro-modified nucleoside - 2' fluorocytidine
  modified_base 12: mod_base = OTHER; note = 2' O-methyl modified nucleoside - 2' O-methylcytidine
  modified_base 13: mod_base = OTHER; note = 2' fluoro-modified nucleoside - 2' fluorocytidine
  modified_base 14: mod_base = OTHER; note = 2' O-methyl modified nucleoside - 2' O-methylguanosine
  modified_base 15: mod_base = OTHER; note = 2' fluoro-modified nucleoside - 2' fluorocytidine
  modified_base 16: mod_base = OTHER; note = 2' O-methyl modified nucleoside - 2' O-methyluridine
  modified_base 17: mod_base = OTHER; note = 2' fluoro-modified nucleoside - 2' fluorocytidine
  modified_base 18: mod_base = OTHER; note = 2' O-methyl modified nucleoside - 2' O-methylcytidine
  modified_base 19: mod_base = OTHER; note = 2' fluoro-modified nucleoside - 2' fluoroadenosine phosphorothioate linkage
  modified_base 20: mod_base = OTHER; note = 2' O-methyl modified nucleoside - 2' O-methyluridine phosphorothioate linkage
  modified_base 21: mod_base = OTHER; note = 2' O-methyl modified nucleoside - 2' O-methyluridine
acttgtgttccccgctccatt

SEQ ID NO: 25993 - RNA, 21 nt, synthetic construct
  source 1..21: mol_type = other RNA; note = Description of Artificial Sequence: Synthetic oligonucleotide
  modified_base 1: mod_base = OTHER; note = 2' fluoro-modified nucleoside - 2' fluorocytidine phosphorothioate linkage
  modified_base 2: mod_base = OTHER; note = 2' O-methyl modified nucleoside - 2' O-methylcytidine phosphorothioate linkage
  modified_base 3: mod_base = OTHER; note = 2' fluoro-modified nucleoside - 2' fluorouridine
  modified_base 4: mod_base = OTHER; note = 2' O-methyl modified nucleoside - 2' O-methylcytidine
  modified_base 5: mod_base = OTHER; note = 2' fluoro-modified nucleoside - 2' fluorocytidine
  modified_base 6: mod_base = OTHER; note = 2' O-methyl modified nucleoside - 2' O-methylcytidine
  modified_base 7: mod_base = OTHER; note = 2' fluoro-modified nucleoside - 2' fluorocytidine
  modified_base 8: mod_base = OTHER; note = 2' fluoro-modified nucleoside - 2' fluorouridine
  modified_base 9: mod_base = OTHER; note = 2' fluoro-modified nucleoside - 2' fluorouridine
  modified_base 10: mod_base = OTHER; note = 2' O-methyl modified nucleoside - 2' O-methyluridine
  modified_base 11: mod_base = OTHER; note = 2' fluoro-modified nucleoside - 2' fluorocytidine
  modified_base 12: mod_base = OTHER; note = 2' O-methyl modified nucleoside - 2' O-methyladenosine
  modified_base 13: mod_base = OTHER; note = 2' fluoro-modified nucleoside - 2' fluorocytidine
  modified_base 14: mod_base = OTHER; note = 2' O-methyl modified nucleoside - 2' O-methyluridine
  modified_base 15: mod_base = OTHER; note = 2' fluoro-modified nucleoside - 2' fluorocytidine
  modified_base 16: mod_base = OTHER; note = 2' O-methyl modified nucleoside - 2' O-methyladenosine
  modified_base 17: mod_base = OTHER; note = 2' fluoro-modified nucleoside - 2' fluoroadenosine
  modified_base 18: mod_base = OTHER; note = 2' O-methyl modified nucleoside - 2' O-methyluridine
  modified_base 19: mod_base = OTHER; note = 2' fluoro-modified nucleoside - 2' fluoroadenosine phosphorothioate linkage
  modified_base 20: mod_base = OTHER; note = 2' O-methyl modified nucleoside - 2' O-methyluridine phosphorothioate linkage
  modified_base 21: mod_base = OTHER; note = 2' O-methyl modified nucleoside - 2' O-methyluridine
cctcccctttcactcaatatt

SEQ ID NO: 25994 - RNA, 21 nt, synthetic construct
  source 1..21: mol_type = other RNA; note = Description of Artificial Sequence: Synthetic oligonucleotide
  modified_base 1: mod_base = OTHER; note = 2' fluoro-modified nucleoside - 2' fluorocytidine phosphorothioate linkage
  modified_base 2: mod_base = OTHER; note = 2' O-methyl modified nucleoside - 2' O-methyluridine phosphorothioate linkage
  modified_base 3: mod_base = OTHER; note = 2' fluoro-modified nucleoside - 2' fluorocytidine
  modified_base 4: mod_base = OTHER; note = 2' O-methyl modified nucleoside - 2' O-methylcytidine
  modified_base 5: mod_base = OTHER; note = 2' fluoro-modified nucleoside - 2' fluorocytidine
  modified_base 6: mod_base = OTHER; note = 2' O-methyl modified nucleoside - 2' O-methylcytidine
  modified_base 7: mod_base = OTHER; note = 2' fluoro-modified nucleoside - 2' fluorouridine
  modified_base 8: mod_base = OTHER; note = 2' fluoro-modified nucleoside - 2' fluorouridine
  modified_base 9: mod_base = OTHER; note = 2' fluoro-modified nucleoside - 2' fluorouridine
  modified_base 10: mod_base = OTHER; note = 2' O-methyl modified nucleoside - 2' O-methylcytidine
  modified_base 11: mod_base = OTHER; note = 2' fluoro-modified nucleoside - 2' fluoroadenosine
  modified_base 12: mod_base = OTHER; note = 2' O-methyl modified nucleoside - 2' O-methylcytidine
  modified_base 13: mod_base = OTHER; note = 2' fluoro-modified nucleoside - 2' fluorouridine
  modified_base 14: mod_base = OTHER; note = 2' O-methyl modified nucleoside - 2' O-methylcytidine
  modified_base 15: mod_base = OTHER; note = 2' fluoro-modified nucleoside - 2' fluoroadenosine
  modified_base 16: mod_base = OTHER; note = 2' O-methyl modified nucleoside - 2' O-methyladenosine
  modified_base 17: mod_base = OTHER; note = 2' fluoro-modified nucleoside - 2' fluorouridine
  modified_base 18: mod_base = OTHER; note = 2' O-methyl modified nucleoside - 2' O-methyluridine
  modified_base 19: mod_base = OTHER; note = 2' fluoro-modified nucleoside - 2' fluoroadenosine phosphorothioate linkage
  modified_base 20: mod_base = OTHER; note = 2' O-methyl modified nucleoside - 2' O-methyluridine phosphorothioate linkage
  modified_base 21: mod_base = OTHER; note = 2' O-methyl modified nucleoside - 2' O-methyluridine
ctcccctttcactcaattatt

SEQ ID NO: 25995 - RNA, 21 nt, synthetic construct
  source 1..21: mol_type = other RNA; note = Description of Artificial Sequence: Synthetic oligonucleotide
  modified_base 1: mod_base = OTHER; note = 2' fluoro-modified nucleoside - 2' fluorocytidine phosphorothioate linkage
  modified_base 2: mod_base = OTHER; note = 2' O-methyl modified nucleoside - 2' O-methylcytidine phosphorothioate linkage
  modified_base 3: mod_base = OTHER; note = 2' fluoro-modified nucleoside - 2' fluorocytidine
  modified_base 4: mod_base = OTHER; note = 2' O-methyl modified nucleoside - 2' O-methylcytidine
  modified_base 5: mod_base = OTHER; note = 2' fluoro-modified nucleoside - 2' fluorouridine
  modified_base 6: mod_base = OTHER; note = 2' O-methyl modified nucleoside - 2' O-methyluridine
  modified_base 7: mod_base = OTHER; note = 2' fluoro-modified nucleoside - 2' fluorouridine
  modified_base 8: mod_base = OTHER; note = 2' fluoro-modified nucleoside - 2' fluorocytidine
  modified_base 9: mod_base = OTHER; note = 2' fluoro-modified nucleoside - 2' fluoroadenosine
  modified_base 10: mod_base = OTHER; note = 2' O-methyl modified nucleoside - 2' O-methylcytidine
  modified_base 11: mod_base = OTHER; note = 2' fluoro-modified nucleoside - 2' fluorouridine
  modified_base 12: mod_base = OTHER; note = 2' O-methyl modified nucleoside - 2' O-methylcytidine
  modified_base 13: mod_base = OTHER; note = 2' fluoro-modified nucleoside - 2' fluoroadenosine
  modified_base 14: mod_base = OTHER; note = 2' O-methyl modified nucleoside - 2' O-methyladenosine
  modified_base 15: mod_base = OTHER; note = 2' fluoro-modified nucleoside - 2' fluorouridine
  modified_base 16: mod_base = OTHER; note = 2' O-methyl modified nucleoside - 2' O-methyluridine
  modified_base 17: mod_base = OTHER; note = 2' fluoro-modified nucleoside - 2' fluorocytidine
  modified_base 18: mod_base = OTHER; note = 2' O-methyl modified nucleoside - 2' O-methyluridine
  modified_base 19: mod_base = OTHER; note = 2' fluoro-modified nucleoside - 2' fluoroadenosine phosphorothioate linkage
  modified_base 20: mod_base = OTHER; note = 2' O-methyl modified nucleoside - 2' O-methyluridine phosphorothioate linkage
  modified_base 21: mod_base = OTHER; note = 2' O-methyl modified nucleoside - 2' O-methyluridine
cccctttcactcaattctatt

SEQ ID NO: 25996 - RNA, 21 nt, synthetic construct
  source 1..21: mol_type = other RNA; note = Description of Artificial Sequence: Synthetic oligonucleotide
  modified_base 1: mod_base = OTHER; note = 2' fluoro-modified nucleoside - 2' fluorocytidine phosphorothioate linkage
  modified_base 2: mod_base = OTHER; note = 2' O-methyl modified nucleoside - 2' O-methylcytidine phosphorothioate linkage
  modified_base 3: mod_base = OTHER; note = 2' fluoro-modified nucleoside - 2' fluorocytidine
  modified_base 4: mod_base = OTHER; note = 2' O-methyl modified nucleoside - 2' O-methyluridine
  modified_base 5: mod_base = OTHER; note = 2' fluoro-modified nucleoside - 2' fluorouridine
  modified_base 6: mod_base = OTHER; note = 2' O-methyl modified nucleoside - 2' O-methyluridine
  modified_base 7: mod_base = OTHER; note = 2' fluoro-modified nucleoside - 2' fluorocytidine
  modified_base 8: mod_base = OTHER; note = 2' fluoro-modified nucleoside - 2' fluoroadenosine
  modified_base 9: mod_base = OTHER; note = 2' fluoro-modified nucleoside - 2' fluorocytidine
  modified_base 10: mod_base = OTHER; note = 2' O-methyl modified nucleoside - 2' O-methyluridine
  modified_base 11: mod_base = OTHER; note = 2' fluoro-modified nucleoside - 2' fluorocytidine
  modified_base 12: mod_base = OTHER; note = 2' O-methyl modified nucleoside - 2' O-methyladenosine
  modified_base 13: mod_base = OTHER; note = 2' fluoro-modified nucleoside - 2' fluoroadenosine
  modified_base 14: mod_base = OTHER; note = 2' O-methyl modified nucleoside - 2' O-methyluridine
  modified_base 15: mod_base = OTHER; note = 2' fluoro-modified nucleoside - 2' fluorouridine
  modified_base 16: mod_base = OTHER; note = 2' O-methyl modified nucleoside - 2' O-methylcytidine
  modified_base 17: mod_base = OTHER; note = 2' fluoro-modified nucleoside - 2' fluorouridine
  modified_base 18: mod_base = OTHER; note = 2' O-methyl modified nucleoside - 2' O-methylcytidine
  modified_base 19: mod_base = OTHER; note = 2' fluoro-modified nucleoside - 2' fluoroadenosine phosphorothioate linkage
  modified_base 20: mod_base = OTHER; note = 2' O-methyl modified nucleoside - 2' O-methyluridine phosphorothioate linkage
  modified_base 21: mod_base = OTHER; note = 2' O-methyl modified nucleoside - 2' O-methyluridine
ccctttcactcaattctcatt

SEQ ID NO: 25997 - RNA, 21 nt, synthetic construct
  source 1..21: mol_type = other RNA; note = Description of Artificial Sequence: Synthetic oligonucleotide
  modified_base 1: mod_base = OTHER; note = 2' fluoro-modified nucleoside - 2' fluorouridine phosphorothioate linkage
  modified_base 2: mod_base = OTHER; note = 2' O-methyl modified nucleoside - 2' O-methylcytidine phosphorothioate linkage
  modified_base 3: mod_base = OTHER; note = 2' fluoro-modified nucleoside - 2' fluorouridine
  modified_base 4: mod_base = OTHER; note = 2' O-methyl modified nucleoside - 2' O-methylcytidine
  modified_base 5: mod_base = OTHER; note = 2' fluoro-modified nucleoside - 2' fluorocytidine
  modified_base 6: mod_base = OTHER; note = 2' O-methyl modified nucleoside - 2' O-methyluridine
  modified_base 7: mod_base = OTHER; note = 2' fluoro-modified nucleoside - 2' fluorouridine
  modified_base 8: mod_base = OTHER; note = 2' fluoro-modified nucleoside - 2' fluorouridine
  modified_base 9: mod_base = OTHER; note = 2' fluoro-modified nucleoside - 2' fluorouridine
  modified_base 10: mod_base = OTHER; note = 2' O-methyl modified nucleoside - 2' O-methylcytidine
  modified_base 11: mod_base = OTHER; note = 2' fluoro-modified nucleoside - 2' fluorouridine
  modified_base 12: mod_base = OTHER; note = 2' O-methyl modified nucleoside - 2' O-methylcytidine
  modified_base 13: mod_base = OTHER; note = 2' fluoro-modified nucleoside - 2' fluoroguanosine
  modified_base 14: mod_base = OTHER; note = 2' O-methyl modified nucleoside - 2' O-methyluridine
  modified_base 15: mod_base = OTHER; note = 2' fluoro-modified nucleoside - 2' fluoroadenosine
  modified_base 16: mod_base = OTHER; note = 2' O-methyl modified nucleoside - 2' O-methyladenosine
  modified_base 17: mod_base = OTHER; note = 2' fluoro-modified nucleoside - 2' fluoroadenosine
  modified_base 18: mod_base = OTHER; note = 2' O-methyl modified nucleoside - 2' O-methylcytidine
  modified_base 19: mod_base = OTHER; note = 2' fluoro-modified nucleoside - 2' fluoroadenosine phosphorothioate linkage
  modified_base 20: mod_base = OTHER; note = 2' O-methyl modified nucleoside - 2' O-methyluridine phosphorothioate linkage
  modified_base 21: mod_base = OTHER; note = 2' O-methyl modified nucleoside - 2' O-methyluridine
tctccttttctcgtaaacatt

SEQ ID NO: 25998 - RNA, 21 nt, synthetic construct
  source 1..21: mol_type = other RNA; note = Description of Artificial Sequence: Synthetic oligonucleotide
  modified_base 1: mod_base = OTHER; note = 2' fluoro-modified nucleoside - 2' fluorocytidine phosphorothioate linkage
  modified_base 2: mod_base = OTHER; note = 2' O-methyl modified nucleoside - 2' O-methyluridine phosphorothioate linkage
  modified_base 3: mod_base = OTHER; note = 2' fluoro-modified nucleoside - 2' fluorocytidine
  modified_base 4: mod_base = OTHER; note = 2' O-methyl modified nucleoside - 2' O-methylcytidine
  modified_base 5: mod_base = OTHER; note = 2' fluoro-modified nucleoside - 2' fluorouridine
  modified_base 6: mod_base = OTHER; note = 2' O-methyl modified nucleoside - 2' O-methyluridine
  modified_base 7: mod_base = OTHER; note = 2' fluoro-modified nucleoside - 2' fluorouridine
  modified_base 8: mod_base = OTHER; note = 2' fluoro-modified nucleoside - 2' fluorouridine
  modified_base 9: mod_base = OTHER; note = 2' fluoro-modified nucleoside - 2' fluorocytidine
  modified_base 10: mod_base = OTHER; note = 2' O-methyl modified nucleoside - 2' O-methyluridine
  modified_base 11: mod_base = OTHER; note = 2' fluoro-modified nucleoside - 2' fluorocytidine
  modified_base 12: mod_base = OTHER; note = 2' O-methyl modified nucleoside - 2' O-methylguanosine
  modified_base 13: mod_base = OTHER; note = 2' fluoro-modified nucleoside - 2' fluorouridine
  modified_base 14: mod_base = OTHER; note = 2' O-methyl modified nucleoside - 2' O-methyladenosine
  modified_base 15: mod_base = OTHER; note = 2' fluoro-modified nucleoside - 2' fluoroadenosine
  modified_base 16: mod_base = OTHER; note = 2' O-methyl modified nucleoside - 2' O-methyladenosine
  modified_base 17: mod_base = OTHER; note = 2' fluoro-modified nucleoside - 2' fluorocytidine
  modified_base 18: mod_base = OTHER; note = 2' O-methyl modified nucleoside - 2' O-methyluridine
  modified_base 19: mod_base = OTHER; note = 2' fluoro-modified nucleoside - 2' fluoroadenosine phosphorothioate linkage
  modified_base 20: mod_base = OTHER; note = 2' O-methyl modified nucleoside - 2' O-methyluridine phosphorothioate linkage
  modified_base 21: mod_base = OTHER; note = 2' O-methyl modified nucleoside - 2' O-methyluridine
ctccttttctcgtaaactatt

SEQ ID NO: 25999 - RNA, 21 nt, synthetic construct
  source 1..21: mol_type = other RNA; note = Description of Artificial Sequence: Synthetic oligonucleotide
  modified_base 1: mod_base = OTHER; note = 2' fluoro-modified nucleoside - 2' fluorouridine phosphorothioate linkage
  modified_base 2: mod_base = OTHER; note = 2' O-methyl modified nucleoside - 2' O-methylcytidine phosphorothioate linkage
  modified_base 3: mod_base = OTHER; note = 2' fluoro-modified nucleoside - 2' fluorocytidine
  modified_base 4: mod_base = OTHER; note = 2' O-methyl modified nucleoside - 2' O-methyluridine
  modified_base 5: mod_base = OTHER; note = 2' fluoro-modified nucleoside - 2' fluorouridine
  modified_base 6: mod_base = OTHER; note = 2' O-methyl modified nucleoside - 2' O-methyluridine
  modified_base 7: mod_base = OTHER; note = 2' fluoro-modified nucleoside - 2' fluorouridine
  modified_base 8: mod_base = OTHER; note = 2' fluoro-modified nucleoside - 2' fluorocytidine
  modified_base 9: mod_base = OTHER; note = 2' fluoro-modified nucleoside - 2' fluorouridine
  modified_base 10: mod_base = OTHER; note = 2' O-methyl modified nucleoside - 2' O-methylcytidine
  modified_base 11: mod_base = OTHER; note = 2' fluoro-modified nucleoside - 2' fluoroguanosine
  modified_base 12: mod_base = OTHER; note = 2' O-methyl modified nucleoside - 2' O-methyluridine
  modified_base 13: mod_base = OTHER; note = 2' fluoro-modified nucleoside - 2' fluoroadenosine
  modified_base 14: mod_base = OTHER; note = 2' O-methyl modified nucleoside - 2' O-methyladenosine
  modified_base 15: mod_base = OTHER; note = 2' fluoro-modified nucleoside - 2' fluoroadenosine
  modified_base 16: mod_base = OTHER; note = 2' O-methyl modified nucleoside - 2' O-methylcytidine
  modified_base 17: mod_base = OTHER; note = 2' fluoro-modified nucleoside - 2' fluorouridine
  modified_base 18: mod_base = OTHER; note = 2' O-methyl modified nucleoside - 2' O-methyluridine
  modified_base 19: mod_base = OTHER; note = 2' fluoro-modified nucleoside - 2' fluoroadenosine phosphorothioate linkage
  modified_base 20: mod_base = OTHER; note = 2' O-methyl modified nucleoside - 2' O-methyluridine phosphorothioate linkage
  modified_base 21: mod_base = OTHER; note = 2' O-methyl modified nucleoside - 2' O-methyluridine
tccttttctcgtaaacttatt

SEQ ID NO: 26000 - RNA, 21 nt, synthetic construct
  source 1..21: mol_type = other RNA; note = Description of Artificial Sequence: Synthetic oligonucleotide
  modified_base 1: mod_base = OTHER; note = 2' fluoro-modified nucleoside - 2' fluorocytidine phosphorothioate linkage
  modified_base 2: mod_base = OTHER; note = 2' O-methyl modified nucleoside - 2' O-methyluridine phosphorothioate linkage
  modified_base 3: mod_base = OTHER; note = 2' fluoro-modified nucleoside - 2' fluorouridine
  modified_base 4: mod_base = OTHER; note = 2' O-methyl modified nucleoside - 2' O-methyluridine
  modified_base 5: mod_base = OTHER; note = 2' fluoro-modified nucleoside - 2' fluorouridine
  modified_base 6: mod_base = OTHER; note = 2' O-methyl modified nucleoside - 2' O-methylcytidine
  modified_base 7: mod_base = OTHER; note = 2' fluoro-modified nucleoside - 2' fluorouridine
  modified_base 8: mod_base = OTHER; note = 2' fluoro-modified nucleoside - 2' fluorocytidine
  modified_base 9: mod_base = OTHER; note = 2' fluoro-modified nucleoside - 2' fluoroguanosine
  modified_base 10: mod_base = OTHER; note = 2' O-methyl modified nucleoside - 2' O-methyluridine
  modified_base 11: mod_base = OTHER; note = 2' fluoro-modified nucleoside - 2' fluoroadenosine
  modified_base 12: mod_base = OTHER; note = 2' O-methyl modified nucleoside - 2' O-methyladenosine
  modified_base 13: mod_base = OTHER; note = 2' fluoro-modified nucleoside - 2' fluoroadenosine
  modified_base 14: mod_base = OTHER; note = 2' O-methyl modified nucleoside - 2' O-methylcytidine
  modified_base 15: mod_base = OTHER; note = 2' fluoro-modified nucleoside - 2' fluorouridine
  modified_base 16: mod_base = OTHER; note = 2' O-methyl modified nucleoside - 2' O-methyluridine
  modified_base 17: mod_base = OTHER; note = 2' fluoro-modified nucleoside - 2' fluorouridine
  modified_base 18: mod_base = OTHER; note = 2' O-methyl modified nucleoside - 2' O-methylguanosine
  modified_base 19: mod_base = OTHER; note = 2' fluoro-modified nucleoside - 2' fluoroadenosine phosphorothioate linkage
  modified_base 20: mod_base = OTHER; note = 2' O-methyl modified nucleoside - 2' O-methyluridine phosphorothioate linkage
  modified_base 21: mod_base = OTHER; note = 2' O-methyl modified nucleoside - 2' O-methyluridine
cttttctcgtaaactttgatt

SEQ ID NO: 26001 - RNA, 21 nt, synthetic construct
  source 1..21: mol_type = other RNA; note = Description of Artificial Sequence: Synthetic oligonucleotide
  modified_base 1: mod_base = OTHER; note = 2' fluoro-modified nucleoside - 2' fluorouridine phosphorothioate linkage
  modified_base 2: mod_base = OTHER; note = 2' O-methyl modified nucleoside - 2' O-methyluridine phosphorothioate linkage
  modified_base 3: mod_base = OTHER; note = 2' fluoro-modified nucleoside - 2' fluorouridine
  modified_base 4: mod_base = OTHER; note = 2' O-methyl modified nucleoside - 2' O-methyluridine
  modified_base 5: mod_base = OTHER; note = 2' fluoro-modified nucleoside - 2' fluorocytidine
  modified_base 6: mod_base = OTHER; note = 2' O-methyl modified nucleoside - 2' O-methyluridine
  modified_base 7: mod_base = OTHER; note = 2' fluoro-modified nucleoside - 2' fluorocytidine
  modified_base 8: mod_base = OTHER; note = 2' fluoro-modified nucleoside - 2' fluoroguanosine
  modified_base 9: mod_base = OTHER; note = 2' fluoro-modified nucleoside - 2' fluorouridine
  modified_base 10: mod_base = OTHER; note = 2' O-methyl modified nucleoside - 2' O-methyladenosine
  modified_base 11: mod_base = OTHER; note = 2' fluoro-modified nucleoside - 2' fluoroadenosine
  modified_base 12: mod_base = OTHER; note = 2' O-methyl modified nucleoside - 2' O-methyladenosine
  modified_base 13: mod_base = OTHER; note = 2' fluoro-modified nucleoside - 2' fluorocytidine
  modified_base 14: mod_base = OTHER; note = 2' O-methyl modified nucleoside - 2' O-methyluridine
  modified_base 15: mod_base = OTHER; note = 2' fluoro-modified nucleoside - 2' fluorouridine
  modified_base 16: mod_base = OTHER; note = 2' O-methyl modified nucleoside - 2' O-methyluridine
  modified_base 17: mod_base = OTHER; note = 2' fluoro-modified nucleoside - 2' fluoroguanosine
  modified_base 18: mod_base = OTHER; note = 2' O-methyl modified nucleoside - 2' O-methylcytidine
  modified_base 19: mod_base = OTHER; note = 2' fluoro-modified nucleoside - 2' fluoroadenosine phosphorothioate linkage
  modified_base 20: mod_base = OTHER; note = 2' O-methyl modified nucleoside - 2' O-methyluridine phosphorothioate linkage
  modified_base 21: mod_base = OTHER; note = 2' O-methyl modified nucleoside - 2' O-methyluridine
ttttctcgtaaactttgcatt

SEQ ID NO: 26002 - RNA, 21 nt, synthetic construct
  source 1..21: mol_type = other RNA; note = Description of Artificial Sequence: Synthetic oligonucleotide
  modified_base 1: mod_base = OTHER; note = 2' fluoro-modified nucleoside - 2' fluorouridine phosphorothioate linkage
  modified_base 2: mod_base = OTHER; note = 2' O-methyl modified nucleoside - 2' O-methyluridine phosphorothioate linkage
  modified_base 3: mod_base = OTHER; note = 2' fluoro-modified nucleoside - 2' fluorocytidine
  modified_base 4: mod_base = OTHER; note = 2' O-methyl modified nucleoside - 2' O-methyluridine
  modified_base 5: mod_base = OTHER; note = 2' fluoro-modified nucleoside - 2' fluorocytidine
  modified_base 6: mod_base = OTHER; note = 2' O-methyl modified nucleoside - 2' O-methylguanosine
  modified_base 7: mod_base = OTHER; note = 2' fluoro-modified nucleoside - 2' fluorouridine
  modified_base 8: mod_base = OTHER; note = 2' fluoro-modified nucleoside - 2' fluoroadenosine
  modified_base 9: mod_base = OTHER; note = 2' fluoro-modified nucleoside - 2' fluoroadenosine
  modified_base 10: mod_base = OTHER; note = 2' O-methyl modified nucleoside - 2' O-methyladenosine
  modified_base 11: mod_base = OTHER; note = 2' fluoro-modified nucleoside - 2' fluorocytidine
  modified_base 12: mod_base = OTHER; note = 2' O-methyl modified nucleoside - 2' O-methyluridine
  modified_base 13: mod_base = OTHER; note = 2' fluoro-modified nucleoside - 2' fluorouridine
  modified_base 14: mod_base = OTHER; note = 2' O-methyl modified nucleoside - 2' O-methyluridine
  modified_base 15: mod_base = OTHER; note = 2' fluoro-modified nucleoside - 2' fluoroguanosine
  modified_base 16: mod_base = OTHER; note = 2' O-methyl modified nucleoside - 2' O-methylcytidine
  modified_base 17: mod_base = OTHER; note = 2' fluoro-modified nucleoside - 2' fluorocytidine
  modified_base 18: mod_base = OTHER; note = 2' O-methyl modified nucleoside - 2' O-methylguanosine
  modified_base 19: mod_base = OTHER; note = 2' fluoro-modified nucleoside - 2' fluoroadenosine phosphorothioate linkage
  modified_base 20: mod_base = OTHER; note = 2' O-methyl modified nucleoside - 2' O-methyluridine phosphorothioate linkage
  modified_base 21: mod_base = OTHER; note = 2' O-methyl modified nucleoside - 2' O-methyluridine
ttctcgtaaactttgccgatt

SEQ ID NO: 26003 - RNA, 21 nt, synthetic construct
  source 1..21: mol_type = other RNA; note = Description of Artificial Sequence: Synthetic oligonucleotide
  modified_base 1: mod_base = OTHER; note = 2' fluoro-modified nucleoside - 2' fluorouridine phosphorothioate linkage
  modified_base 2: mod_base = OTHER; note = 2' O-methyl modified nucleoside - 2' O-methylcytidine phosphorothioate linkage
  modified_base 3: mod_base = OTHER; note = 2' fluoro-modified nucleoside - 2' fluorouridine
  modified_base 4: mod_base = OTHER; note = 2' O-methyl modified nucleoside - 2' O-methylcytidine
  modified_base 5: mod_base = OTHER; note = 2' fluoro-modified nucleoside - 2' fluoroguanosine
  modified_base 6: mod_base = OTHER; note = 2' O-methyl modified nucleoside - 2' O-methyluridine
  modified_base 7: mod_base = OTHER; note = 2' fluoro-modified nucleoside - 2' fluoroadenosine
  modified_base 8: mod_base = OTHER; note = 2' fluoro-modified nucleoside - 2' fluoroadenosine
  modified_base 9: mod_base = OTHER; note = 2' fluoro-modified nucleoside - 2' fluoroadenosine
  modified_base 10: mod_base = OTHER; note = 2' O-methyl modified nucleoside - 2' O-methylcytidine
  modified_base 11: mod_base = OTHER; note = 2' fluoro-modified nucleoside - 2' fluorouridine
  modified_base 12: mod_base = OTHER; note = 2' O-methyl modified nucleoside - 2' O-methyluridine
  modified_base 13: mod_base = OTHER; note = 2' fluoro-modified nucleoside - 2' fluorouridine
  modified_base 14: mod_base = OTHER; note = 2' O-methyl modified nucleoside - 2' O-methylguanosine
  modified_base 15: mod_base = OTHER; note = 2' fluoro-modified nucleoside - 2' fluorocytidine
  modified_base 16: mod_base = OTHER; note = 2' O-methyl modified nucleoside - 2' O-methylcytidine
  modified_base 17: mod_base = OTHER; note = 2' fluoro-modified nucleoside - 2' fluoroguanosine
  modified_base 18: mod_base = OTHER; note = 2' O-methyl modified nucleoside - 2' O-methylcytidine
  modified_base 19: mod_base = OTHER; note = 2' fluoro-modified nucleoside - 2' fluoroadenosine phosphorothioate linkage
  modified_base 20: mod_base = OTHER; note = 2' O-methyl modified nucleoside - 2' O-methyluridine phosphorothioate linkage
  modified_base 21: mod_base = OTHER; note = 2' O-methyl modified nucleoside - 2' O-methyluridine
tctcgtaaactttgccgcatt

SEQ ID NO: 26004 - RNA, 21 nt, synthetic construct
  source 1..21: mol_type = other RNA; note = Description of Artificial Sequence: Synthetic oligonucleotide
  modified_base 1: mod_base = OTHER; note = 2' fluoro-modified nucleoside - 2' fluorocytidine phosphorothioate linkage
  modified_base 2: mod_base = OTHER; note = 2' O-methyl modified nucleoside - 2' O-methyluridine phosphorothioate linkage
  modified_base 3: mod_base = OTHER; note = 2' fluoro-modified nucleoside - 2' fluorocytidine
  modified_base 4: mod_base = OTHER; note = 2' O-methyl modified nucleoside - 2' O-methylguanosine
  modified_base 5: mod_base = OTHER; note = 2' fluoro-modified nucleoside - 2' fluorouridine
  modified_base 6: mod_base = OTHER; note = 2' O-methyl modified nucleoside - 2' O-methyladenosine
  modified_base 7: mod_base = OTHER; note = 2' fluoro-modified nucleoside - 2' fluoroadenosine
  modified_base 8: mod_base = OTHER; note = 2' fluoro-modified nucleoside - 2' fluoroadenosine
  modified_base 9: mod_base = OTHER; note = 2' fluoro-modified nucleoside - 2' fluorocytidine
  modified_base 10: mod_base = OTHER; note = 2' O-methyl modified nucleoside - 2' O-methyluridine
  modified_base 11: mod_base = OTHER; note = 2' fluoro-modified nucleoside - 2' fluorouridine
  modified_base 12: mod_base = OTHER; note = 2' O-methyl modified nucleoside - 2' O-methyluridine
  modified_base 13: mod_base = OTHER; note = 2' fluoro-modified nucleoside - 2' fluoroguanosine
  modified_base 14: mod_base = OTHER; note = 2' O-methyl modified nucleoside - 2' O-methylcytidine
  modified_base 15: mod_base = OTHER; note = 2' fluoro-modified nucleoside - 2' fluorocytidine
  modified_base 16: mod_base = OTHER; note = 2' O-methyl modified nucleoside - 2' O-methylguanosine
  modified_base 17: mod_base = OTHER; note = 2' fluoro-modified nucleoside - 2' fluorocytidine
  modified_base 18: mod_base = OTHER; note = 2' O-methyl modified nucleoside - 2' O-methylcytidine
  modified_base 19: mod_base = OTHER; note = 2' fluoro-modified nucleoside - 2' fluoroadenosine phosphorothioate linkage
  modified_base 20: mod_base = OTHER; note = 2' O-methyl modified nucleoside - 2' O-methyluridine phosphorothioate linkage
  modified_base 21: mod_base = OTHER; note = 2' O-methyl modified nucleoside - 2' O-methyluridine
ctcgtaaactttgccgccatt

SEQ ID NO: 26005 - RNA, 21 nt, synthetic construct
  source 1..21: mol_type = other RNA; note = Description of Artificial Sequence: Synthetic oligonucleotide
  modified_base 1: mod_base = OTHER; note = 2' fluoro-modified nucleoside - 2' fluorouridine phosphorothioate linkage
  modified_base 2: mod_base = OTHER; note = 2' O-methyl modified nucleoside - 2' O-methylcytidine phosphorothioate linkage
  modified_base 3: mod_base = OTHER; note = 2' fluoro-modified nucleoside - 2' fluoroguanosine
  modified_base 4: mod_base = OTHER; note = 2' O-methyl modified nucleoside - 2' O-methyluridine
  modified_base 5: mod_base = OTHER; note = 2' fluoro-modified nucleoside - 2' fluoroadenosine
  modified_base 6: mod_base = OTHER; note = 2' O-methyl modified nucleoside - 2' O-methyladenosine
  modified_base 7: mod_base = OTHER; note = 2' fluoro-modified nucleoside - 2' fluoroadenosine
  modified_base 8: mod_base = OTHER; note = 2' fluoro-modified nucleoside - 2' fluorocytidine
  modified_base 9: mod_base = OTHER; note = 2' fluoro-modified nucleoside - 2' fluorouridine
  modified_base 10: mod_base = OTHER; note = 2' O-methyl modified nucleoside - 2' O-methyluridine
  modified_base 11: mod_base = OTHER; note = 2' fluoro-modified nucleoside - 2' fluorouridine
  modified_base 12: mod_base = OTHER; note = 2' O-methyl modified nucleoside - 2' O-methylguanosine
  modified_base 13: mod_base = OTHER; note = 2' fluoro-modified nucleoside - 2' fluorocytidine
  modified_base 14: mod_base = OTHER; note = 2' O-methyl modified nucleoside - 2' O-methylcytidine
  modified_base 15: mod_base = OTHER; note = 2' fluoro-modified nucleoside - 2' fluoroguanosine
  modified_base 16: mod_base = OTHER; note = 2' O-methyl modified nucleoside - 2' O-methylcytidine
  modified_base 17: mod_base = OTHER; note = 2' fluoro-modified nucleoside - 2' fluorocytidine
  modified_base 18: mod_base = OTHER; note = 2' O-methyl modified nucleoside - 2' O-methyluridine
  modified_base 19: mod_base = OTHER; note = 2' fluoro-modified nucleoside - 2' fluoroadenosine phosphorothioate linkage
  modified_base 20: mod_base = OTHER; note = 2' O-methyl modified nucleoside - 2' O-methyluridine phosphorothioate linkage
  modified_base 21: mod_base = OTHER; note = 2' O-methyl modified nucleoside - 2' O-methyluridine
tcgtaaactttgccgcctatt

SEQ ID NO: 26006 - RNA, 21 nt, synthetic construct
  source 1..21: mol_type = other RNA; note = Description of Artificial Sequence: Synthetic oligonucleotide
  modified_base 1: mod_base = OTHER; note = 2' fluoro-modified nucleoside - 2' fluoroguanosine phosphorothioate linkage
  modified_base 2: mod_base = OTHER; note = 2' O-methyl modified nucleoside - 2' O-methyluridine phosphorothioate linkage
  modified_base 3: mod_base = OTHER; note = 2' fluoro-modified nucleoside - 2' fluoroadenosine
  modified_base 4: mod_base = OTHER; note = 2' O-methyl modified nucleoside - 2' O-methyladenosine
  modified_base 5: mod_base = OTHER; note = 2' fluoro-modified nucleoside - 2' fluoroadenosine
  modified_base 6: mod_base = OTHER; note = 2' O-methyl modified nucleoside - 2' O-methylcytidine
  modified_base 7: mod_base = OTHER; note = 2' fluoro-modified nucleoside - 2' fluorouridine
  modified_base 8: mod_base = OTHER; note = 2' fluoro-modified nucleoside - 2' fluorouridine
  modified_base 9: mod_base = OTHER; note = 2' fluoro-modified nucleoside - 2' fluorouridine
  modified_base 10: mod_base = OTHER; note = 2' O-methyl modified nucleoside - 2' O-methylguanosine
  modified_base 11: mod_base = OTHER; note = 2' fluoro-modified nucleoside - 2' fluorocytidine
  modified_base 12: mod_base = OTHER; note = 2' O-methyl modified nucleoside - 2' O-methylcytidine
  modified_base 13: mod_base = OTHER; note = 2' fluoro-modified nucleoside - 2' fluoroguanosine
  modified_base 14: mod_base = OTHER; note = 2' O-methyl modified nucleoside - 2' O-methylcytidine
  modified_base 15: mod_base = OTHER; note = 2' fluoro-modified nucleoside - 2' fluorocytidine
  modified_base 16: mod_base = OTHER; note = 2' O-methyl modified nucleoside - 2' O-methyluridine
  modified_base 17: mod_base = OTHER; note = 2' fluoro-modified nucleoside - 2' fluoroadenosine
  modified_base 18: mod_base = OTHER; note = 2' O-methyl modified nucleoside - 2' O-methyluridine
  modified_base 19: mod_base = OTHER; note = 2' fluoro-modified nucleoside - 2' fluoroadenosine phosphorothioate linkage
  modified_base 20: mod_base = OTHER; note = 2' O-methyl modified nucleoside - 2' O-methyluridine phosphorothioate linkage
  modified_base 21: mod_base = OTHER; note = 2' O-methyl modified nucleoside - 2' O-methyluridine
gtaaactttgccgcctatatt

SEQ ID NO: 26007 - RNA, 21 nt, synthetic construct
  source 1..21: mol_type = other RNA; note = Description of Artificial Sequence: Synthetic oligonucleotide
  modified_base 1: mod_base = OTHER; note = 2' fluoro-modified nucleoside - 2' fluorouridine phosphorothioate linkage
  modified_base 2: mod_base = OTHER; note = 2' O-methyl modified nucleoside - 2' O-methyladenosine phosphorothioate linkage
  modified_base 3: mod_base = OTHER; note = 2' fluoro-modified nucleoside - 2' fluoroadenosine
  modified_base 4: mod_base = OTHER; note = 2' O-methyl modified nucleoside - 2' O-methyladenosine
  modified_base 5: mod_base = OTHER; note = 2' fluoro-modified nucleoside - 2' fluorocytidine
  modified_base 6: mod_base = OTHER; note = 2' O-methyl modified nucleoside - 2' O-methyluridine
  modified_base 7: mod_base = OTHER; note = 2' fluoro-modified nucleoside - 2' fluorouridine
  modified_base 8: mod_base = OTHER; note = 2' fluoro-modified nucleoside - 2' fluorouridine
  modified_base 9: mod_base = OTHER; note = 2' fluoro-modified nucleoside - 2' fluoroguanosine
  modified_base 10: mod_base = OTHER; note = 2' O-methyl modified nucleoside - 2' O-methylcytidine
  modified_base 11: mod_base = OTHER; note = 2' fluoro-modified nucleoside - 2' fluorocytidine
  modified_base 12: mod_base = OTHER; note = 2' O-methyl modified nucleoside - 2' O-methylguanosine
  modified_base 13: mod_base = OTHER; note = 2' fluoro-modified nucleoside - 2' fluorocytidine
  modified_base 14: mod_base = OTHER; note = 2' O-methyl modified nucleoside - 2' O-methylcytidine
  modified_base 15: mod_base = OTHER; note = 2' fluoro-modified nucleoside - 2' fluorouridine
  modified_base 16: mod_base = OTHER; note = 2' O-methyl modified nucleoside - 2' O-methyladenosine
  modified_base 17: mod_base = OTHER; note = 2' fluoro-modified nucleoside - 2' fluorouridine
  modified_base 18: mod_base = OTHER; note = 2' O-methyl modified nucleoside - 2' O-methylguanosine
  modified_base 19: mod_base = OTHER; note = 2' fluoro-modified nucleoside - 2' fluoroadenosine phosphorothioate linkage
  modified_base 20: mod_base = OTHER; note = 2' O-methyl modified nucleoside - 2' O-methyluridine phosphorothioate linkage
  modified_base 21: mod_base = OTHER; note = 2' O-methyl modified nucleoside - 2' O-methyluridine
taaactttgccgcctatgatt

SEQ ID NO: 26008 - RNA, 21 nt, synthetic construct
  source 1..21: mol_type = other RNA; note = Description of Artificial Sequence: Synthetic oligonucleotide
  modified_base 1: mod_base = OTHER; note = 2' fluoro-modified nucleoside - 2' fluoroadenosine phosphorothioate linkage
  modified_base 2: mod_base = OTHER; note = 2' O-methyl modified nucleoside - 2' O-methyladenosine phosphorothioate linkage
  modified_base 3: mod_base = OTHER; note = 2' fluoro-modified nucleoside - 2' fluorocytidine
  modified_base 4: mod_base = OTHER; note = 2' O-methyl modified nucleoside - 2' O-methyluridine
  modified_base 5: mod_base = OTHER; note = 2' fluoro-modified nucleoside - 2' fluorouridine
  modified_base 6: mod_base = OTHER; note = 2' O-methyl modified nucleoside - 2' O-methyluridine
  modified_base 7: mod_base = OTHER; note = 2' fluoro-modified nucleoside - 2' fluoroguanosine
  modified_base 8: mod_base = OTHER; note = 2' fluoro-modified nucleoside - 2' fluorocytidine
  modified_base 9: mod_base = OTHER; note = 2' fluoro-modified nucleoside - 2' fluorocytidine
  modified_base 10: mod_base = OTHER; note = 2' O-methyl modified nucleoside - 2' O-methylguanosine
  modified_base 11: mod_base = OTHER; note = 2' fluoro-modified nucleoside - 2' fluorocytidine
  modified_base 12: mod_base = OTHER; note = 2' O-methyl modified nucleoside - 2' O-methylcytidine
  modified_base 13: mod_base = OTHER; note = 2' fluoro-modified nucleoside - 2' fluorouridine
  modified_base 14: mod_base = OTHER; note = 2' O-methyl modified nucleoside - 2' O-methyladenosine
  modified_base 15: mod_base = OTHER; note = 2' fluoro-modified nucleoside - 2' fluorouridine
  modified_base 16: mod_base = OTHER; note = 2' O-methyl modified nucleoside - 2' O-methylguanosine
  modified_base 17: mod_base = OTHER; note = 2' fluoro-modified nucleoside - 2' fluoroadenosine
  modified_base 18: mod_base = OTHER; note = 2' O-methyl modified nucleoside - 2' O-methylguanosine
  modified_base 19: mod_base = OTHER; note = 2' fluoro-modified nucleoside - 2' fluoroadenosine phosphorothioate linkage
  modified_base 20: mod_base = OTHER; note = 2' O-methyl modified nucleoside - 2' O-methyluridine phosphorothioate linkage
  modified_base 21: mod_base = OTHER; note = 2' O-methyl modified nucleoside - 2' O-methyluridine
aactttgccgcctatgagatt

SEQ ID NO: 26009 - RNA, 21 nt, synthetic construct
  source 1..21: mol_type = other RNA; note = Description of Artificial Sequence: Synthetic oligonucleotide
  modified_base 1: mod_base = OTHER; note = 2' fluoro-modified nucleoside - 2' fluorocytidine phosphorothioate linkage
  modified_base 2: mod_base = OTHER; note = 2' O-methyl modified nucleoside - 2' O-methylguanosine phosphorothioate linkage
  modified_base 3: mod_base = OTHER; note = 2' fluoro-modified nucleoside - 2' fluorocytidine
  modified_base 4: mod_base = OTHER; note = 2' O-methyl modified nucleoside - 2' O-methylcytidine
  modified_base 5: mod_base = OTHER; note = 2' fluoro-modified nucleoside - 2' fluorouridine
  modified_base 6: mod_base = OTHER; note = 2' O-methyl modified nucleoside - 2' O-methyladenosine
  modified_base 7: mod_base = OTHER; note = 2' fluoro-modified nucleoside - 2' fluorouridine
  modified_base 8: mod_base = OTHER; note = 2' fluoro-modified nucleoside - 2' fluoroguanosine
  modified_base 9: mod_base = OTHER; note = 2' fluoro-modified nucleoside - 2' fluoroadenosine
  modified_base 10: mod_base = OTHER; note = 2' O-methyl modified nucleoside - 2' O-methylguanosine
  modified_base 11: mod_base = OTHER; note = 2' fluoro-modified nucleoside - 2' fluorocytidine
  modified_base 12: mod_base = OTHER; note = 2' O-methyl modified nucleoside - 2' O-methyladenosine
  modified_base 13: mod_base = OTHER; note = 2' fluoro-modified nucleoside - 2' fluoroguanosine
  modified_base 14: mod_base = OTHER; note = 2' O-methyl modified nucleoside - 2' O-methylcytidine
  modified_base 15: mod_base = OTHER; note = 2' fluoro-modified nucleoside - 2' fluorocytidine
  modified_base 16: mod_base = OTHER; note = 2' O-methyl modified nucleoside - 2' O-methyladenosine
  modified_base 17: mod_base = OTHER; note = 2' fluoro-modified nucleoside - 2' fluorocytidine
  modified_base 18: mod_base = OTHER; note = 2' O-methyl modified nucleoside - 2' O-methyladenosine
  modified_base 19: mod_base = OTHER; note = 2' fluoro-modified nucleoside - 2' fluoroadenosine phosphorothioate linkage
  modified_base 20: mod_base = OTHER; note = 2' O-methyl modified nucleoside - 2' O-methyluridine phosphorothioate linkage
  modified_base 21: mod_base = OTHER; note = 2' O-methyl modified nucleoside - 2' O-methyluridine
cgcctatgagcagccacaatt

SEQ ID NO: 26010 - RNA, 21 nt, synthetic construct
  source 1..21: mol_type = other RNA; note = Description of Artificial Sequence: Synthetic oligonucleotide
  modified_base 1: mod_base = OTHER; note = 2' fluoro-modified nucleoside - 2' fluorocytidine phosphorothioate linkage
  modified_base 2: mod_base = OTHER; note = 2' O-methyl modified nucleoside - 2' O-methyluridine phosphorothioate linkage
  modified_base 3: mod_base = OTHER; note = 2' fluoro-modified nucleoside - 2' fluoroadenosine
  modified_base 4: mod_base = OTHER; note = 2' O-methyl modified nucleoside - 2' O-methyluridine
  modified_base 5: mod_base = OTHER; note = 2' fluoro-modified nucleoside - 2' fluoroguanosine
  modified_base 6: mod_base = OTHER; note = 2' O-methyl modified nucleoside - 2' O-methyladenosine
  modified_base 7: mod_base = OTHER; note = 2' fluoro-modified nucleoside - 2' fluoroguanosine
  modified_base 8: mod_base = OTHER; note = 2' fluoro-modified nucleoside - 2' fluorocytidine
  modified_base 9: mod_base = OTHER; note = 2' fluoro-modified nucleoside - 2' fluoroadenosine
  modified_base 10: mod_base = OTHER; note = 2' O-methyl modified nucleoside - 2' O-methylguanosine
  modified_base 11: mod_base = OTHER; note = 2' fluoro-modified nucleoside - 2' fluorocytidine
  modified_base 12: mod_base = OTHER; note = 2' O-methyl modified nucleoside - 2' O-methylcytidine
  modified_base 13: mod_base = OTHER; note = 2' fluoro-modified nucleoside - 2' fluoroadenosine
  modified_base 14: mod_base = OTHER; note = 2' O-methyl modified nucleoside - 2' O-methylcytidine
  modified_base 15: mod_base = OTHER; note = 2' fluoro-modified nucleoside - 2' fluoroadenosine
  modified_base 16: mod_base = OTHER; note = 2' O-methyl modified nucleoside - 2' O-methyluridine
  modified_base 17: mod_base = OTHER; note = 2' fluoro-modified nucleoside - 2' fluorouridine
  modified_base 18: mod_base = OTHER; note = 2' O-methyl modified nucleoside - 2' O-methylguanosine
  modified_base 19: mod_base = OTHER; note = 2' fluoro-modified nucleoside - 2' fluoroadenosine phosphorothioate linkage
  modified_base 20: mod_base = OTHER; note = 2' O-methyl modified nucleoside - 2' O-methyluridine phosphorothioate linkage
  modified_base 21: mod_base = OTHER; note = 2' O-methyl modified nucleoside - 2' O-methyluridine
ctatgagcagccacattgatt

SEQ ID NO: 26011 - RNA, 21 nt, synthetic construct
  source 1..21: mol_type = other RNA; note = Description of Artificial Sequence: Synthetic oligonucleotide
  modified_base 1: mod_base = OTHER; note = 2' fluoro-modified nucleoside - 2' fluoroguanosine phosphorothioate linkage
  modified_base 2: mod_base = OTHER; note = 2' O-methyl modified nucleoside - 2' O-methylcytidine phosphorothioate linkage
  modified_base 3: mod_base = OTHER; note = 2' fluoro-modified nucleoside - 2' fluoroadenosine
  modified_base 4: mod_base = OTHER; note = 2' O-methyl modified nucleoside - 2' O-methylguanosine
  modified_base 5: mod_base = OTHER; note = 2' fluoro-modified nucleoside - 2' fluorocytidine
  modified_base 6: mod_base = OTHER; note = 2' O-methyl modified nucleoside - 2' O-methylcytidine
  modified_base 7: mod_base = OTHER; note = 2' fluoro-modified nucleoside - 2' fluoroadenosine
  modified_base 8: mod_base = OTHER; note = 2' fluoro-modified nucleoside - 2' fluorocytidine
  modified_base 9: mod_base = OTHER; note = 2' fluoro-modified nucleoside - 2' fluoroadenosine
  modified_base 10: mod_base = OTHER; note = 2' O-methyl modified nucleoside - 2' O-methyluridine
  modified_base 11: mod_base = OTHER; note = 2' fluoro-modified nucleoside - 2' fluorouridine
  modified_base 12: mod_base = OTHER; note = 2' O-methyl modified nucleoside - 2' O-methylguanosine
  modified_base 13: mod_base = OTHER; note = 2' fluoro-modified nucleoside - 2' fluorocytidine
  modified_base 14: mod_base = OTHER; note = 2' O-methyl modified nucleoside - 2' O-methylcytidine
  modified_base 15: mod_base = OTHER; note = 2' fluoro-modified nucleoside - 2' fluorouridine
  modified_base 16: mod_base = OTHER; note = 2' O-methyl modified nucleoside - 2' O-methyluridine
  modified_base 17: mod_base = OTHER; note = 2' fluoro-modified nucleoside - 2' fluoroadenosine
  modified_base 18: mod_base = OTHER; note = 2' O-methyl modified nucleoside - 2' O-methylcytidine
  modified_base 19: mod_base = OTHER; note = 2' fluoro-modified nucleoside - 2' fluoroadenosine phosphorothioate linkage
  modified_base 20: mod_base = OTHER; note = 2' O-methyl modified nucleoside - 2' O-methyluridine phosphorothioate linkage
  modified_base 21: mod_base = OTHER; note = 2' O-methyl modified nucleoside - 2' O-methyluridine
gcagccacattgccttacatt

SEQ ID NO: 26012 - RNA, 21 nt, synthetic construct
  source 1..21: mol_type = other RNA; note = Description of Artificial Sequence: Synthetic oligonucleotide
  modified_base 1: mod_base = OTHER; note = 2' O-methyl modified nucleoside - 2' O-methyluridine phosphorothioate linkage
  modified_base 2: mod_base = OTHER; note = 2' fluoro-modified nucleoside - 2' fluoroguanosine phosphorothioate linkage
  modified_base 3: mod_base = OTHER; note = 2' O-methyl modified nucleoside - 2' O-methylcytidine
  modified_base 4: mod_base = OTHER; note = 2' fluoro-modified nucleoside - 2' fluorocytidine
  modified_base 5: mod_base = OTHER; note = 2' O-methyl modified nucleoside - 2' O-methyluridine
  modified_base 6: mod_base = OTHER; note = 2' fluoro-modified nucleoside - 2' fluorouridine
  modified_base 7: mod_base = OTHER; note = 2' O-methyl modified nucleoside - 2' O-methyladenosine
  modified_base 8: mod_base = OTHER; note = 2' fluoro-modified nucleoside - 2' fluoroadenosine
  modified_base 9: mod_base = OTHER; note = 2' O-methyl modified nucleoside - 2' O-methylguanosine
  modified_base 10: mod_base = OTHER; note = 2' fluoro-modified nucleoside - 2' fluorouridine
  modified_base 11: mod_base = OTHER; note = 2' O-methyl modified nucleoside - 2' O-methyluridine
  modified_base 12: mod_base = OTHER; note = 2' O-methyl modified nucleoside - 2' O-methylguanosine
  modified_base 13: mod_base = OTHER; note = 2' O-methyl modified nucleoside - 2' O-methylguanosine
  modified_base 14: mod_base = OTHER; note = 2' fluoro-modified nucleoside - 2' fluoroadenosine
  modified_base 15: mod_base = OTHER; note = 2' O-methyl modified nucleoside - 2' O-methylguanosine
  modified_base 16: mod_base = OTHER; note = 2' fluoro-modified nucleoside - 2' fluorouridine
  modified_base 17: mod_base = OTHER; note = 2' O-methyl modified nucleoside - 2' O-methylcytidine
  modified_base 18: mod_base = OTHER; note = 2' fluoro-modified nucleoside - 2' fluorouridine
  modified_base 19: mod_base = OTHER; note = 2' O-methyl modified nucleoside - 2' O-methylcytidine phosphorothioate linkage
  modified_base 20: mod_base = OTHER; note = 2' O-methyl modified nucleoside - 2' O-methyluridine phosphorothioate linkage
  modified_base 21: mod_base = OTHER; note = 2' O-methyl modified nucleoside - 2' O-methyluridine
tgccttaagttggagtctctt

SEQ ID NO: 26013 - RNA, 21 nt, synthetic construct
  source 1..21: mol_type = other RNA; note = Description of Artificial Sequence: Synthetic oligonucleotide
  modified_base 1: mod_base = OTHER; note = 2' O-methyl modified nucleoside - 2' O-methyluridine phosphorothioate linkage
  modified_base 2: mod_base = OTHER; note = 2' fluoro-modified nucleoside - 2' fluorouridine phosphorothioate linkage
  modified_base 3: mod_base = OTHER; note = 2' O-methyl modified nucleoside - 2' O-methylguanosine
  modified_base 4: mod_base = OTHER; note = 2' fluoro-modified nucleoside - 2' fluorocytidine
  modified_base 5: mod_base = OTHER; note = 2' O-methyl modified nucleoside - 2' O-methylcytidine
  modified_base 6: mod_base = OTHER; note = 2' fluoro-modified nucleoside - 2' fluorouridine
  modified_base 7: mod_base = OTHER; note = 2' O-methyl modified nucleoside - 2' O-methyluridine
  modified_base 8: mod_base = OTHER; note = 2' fluoro-modified nucleoside - 2' fluoroadenosine
  modified_base 9: mod_base = OTHER; note = 2' O-methyl modified nucleoside - 2' O-methyladenosine
  modified_base 10: mod_base = OTHER; note = 2' fluoro-modified nucleoside - 2' fluoroguanosine
  modified_base 11: mod_base = OTHER; note = 2' O-methyl modified nucleoside - 2' O-methyluridine
  modified_base 12: mod_base = OTHER; note = 2' O-methyl modified nucleoside - 2' O-methyluridine
  modified_base 13: mod_base = OTHER; note = 2' O-methyl modified nucleoside - 2' O-methylguanosine
  modified_base 14: mod_base = OTHER; note = 2' fluoro-modified nucleoside - 2' fluoroguanosine
  modified_base 15: mod_base = OTHER; note = 2' O-methyl modified nucleoside - 2' O-methyladenosine
  modified_base 16: mod_base = OTHER; note = 2' fluoro-modified nucleoside - 2' fluoroguanosine
  modified_base 17: mod_base = OTHER; note = 2' O-methyl modified nucleoside - 2' O-methyluridine
  modified_base 18: mod_base = OTHER; note = 2' fluoro-modified nucleoside - 2' fluorocytidine
  modified_base 19: mod_base = OTHER; note = 2' O-methyl modified nucleoside - 2' O-methyluridine phosphorothioate linkage
  modified_base 20: mod_base = OTHER; note = 2' O-methyl modified nucleoside - 2' O-methyluridine phosphorothioate linkage
  modified_base 21: mod_base = OTHER; note = 2' O-methyl modified nucleoside - 2' O-methyluridine
ttgccttaagttggagtcttt

SEQ ID NO: 26014 - RNA, 21 nt, synthetic construct
  source 1..21: mol_type = other RNA; note = Description of Artificial Sequence: Synthetic oligonucleotide
  modified_base 1: mod_base = OTHER; note = 2' O-methyl modified nucleoside - 2' O-methyluridine phosphorothioate linkage
  modified_base 2: mod_base = OTHER; note = 2' fluoro-modified nucleoside - 2' fluoroguanosine phosphorothioate linkage
  modified_base 3: mod_base = OTHER; note = 2' O-methyl modified nucleoside - 2' O-methylcytidine
  modified_base 4: mod_base = OTHER; note = 2' fluoro-modified nucleoside - 2' fluorouridine
  modified_base 5: mod_base = OTHER; note = 2' O-methyl modified nucleoside - 2' O-methylguanosine
  modified_base 6: mod_base = OTHER; note = 2' fluoro-modified nucleoside - 2' fluorouridine
  modified_base 7: mod_base = OTHER; note = 2' O-methyl modified nucleoside - 2' O-methyluridine
  modified_base 8: mod_base = OTHER; note = 2' fluoro-modified nucleoside - 2' fluoroguanosine
  modified_base 9: mod_base = OTHER; note = 2' O-methyl modified nucleoside - 2' O-methylcytidine
  modified_base 10: mod_base = OTHER; note = 2' fluoro-modified nucleoside - 2' fluorocytidine
  modified_base 11: mod_base = OTHER; note = 2' O-methyl modified nucleoside - 2' O-methyluridine
  modified_base 12: mod_base = OTHER; note = 2' O-methyl modified nucleoside - 2' O-methyluridine
  modified_base 13: mod_base = OTHER; note = 2' O-methyl modified nucleoside - 2' O-methyladenosine
  modified_base 14: mod_base = OTHER; note = 2' fluoro-modified nucleoside - 2' fluoroadenosine
  modified_base 15: mod_base = OTHER; note = 2' O-methyl modified nucleoside - 2' O-methylguanosine
  modified_base 16: mod_base = OTHER; note = 2' fluoro-modified nucleoside - 2' fluorouridine
  modified_base 17: mod_base = OTHER; note = 2' O-methyl modified nucleoside - 2' O-methyluridine
  modified_base 18: mod_base = OTHER; note = 2' fluoro-modified nucleoside - 2' fluoroguanosine
  modified_base 19: mod_base = OTHER; note = 2' O-methyl modified nucleoside - 2' O-methylguanosine phosphorothioate linkage
  modified_base 20: mod_base = OTHER; note = 2' O-methyl modified nucleoside - 2' O-methyluridine phosphorothioate linkage
  modified_base 21: mod_base = OTHER; note = 2' O-methyl modified nucleoside - 2' O-methyluridine
tgctgttgccttaagttggtt

SEQ ID NO: 26015 - RNA, 21 nt, synthetic construct
  source 1..21: mol_type = other RNA; note = Description of Artificial Sequence: Synthetic oligonucleotide
  modified_base 1: mod_base = OTHER; note = 2' O-methyl modified nucleoside - 2' O-methyluridine phosphorothioate linkage
  modified_base 2: mod_base = OTHER; note = 2' fluoro-modified nucleoside - 2' fluorouridine phosphorothioate linkage
  modified_base 3: mod_base = OTHER; note = 2' O-methyl modified nucleoside - 2' O-methylguanosine
  modified_base 4: mod_base = OTHER; note = 2' fluoro-modified nucleoside - 2' fluorocytidine
  modified_base 5: mod_base = OTHER; note = 2' O-methyl modified nucleoside - 2' O-methyluridine
  modified_base 6: mod_base = OTHER; note = 2' fluoro-modified nucleoside - 2' fluoroguanosine
  modified_base 7: mod_base = OTHER; note = 2' O-methyl modified nucleoside - 2' O-methyluridine
  modified_base 8: mod_base = OTHER; note = 2' fluoro-modified nucleoside - 2' fluorouridine
  modified_base 9: mod_base = OTHER; note = 2' O-methyl modified nucleoside - 2' O-methylguanosine
  modified_base 10: mod_base = OTHER; note = 2' fluoro-modified nucleoside - 2' fluorocytidine
  modified_base 11: mod_base = OTHER; note = 2' O-methyl modified nucleoside - 2' O-methylcytidine
  modified_base 12: mod_base = OTHER; note = 2' O-methyl modified nucleoside - 2' O-methyluridine
  modified_base 13: mod_base = OTHER; note = 2' O-methyl modified nucleoside - 2' O-methyluridine
  modified_base 14: mod_base = OTHER; note = 2' fluoro-modified nucleoside - 2' fluoroadenosine
  modified_base 15: mod_base = OTHER; note = 2' O-methyl modified nucleoside - 2' O-methyladenosine
  modified_base 16: mod_base = OTHER; note = 2' fluoro-modified nucleoside - 2' fluoroguanosine
  modified_base 17: mod_base = OTHER; note = 2' O-methyl modified nucleoside - 2' O-methyluridine
  modified_base 18: mod_base = OTHER; note = 2' fluoro-modified nucleoside - 2' fluorouridine
  modified_base 19: mod_base = OTHER; note = 2' O-methyl modified nucleoside - 2' O-methylguanosine phosphorothioate linkage
  modified_base 20: mod_base = OTHER; note = 2' O-methyl modified nucleoside - 2' O-methyluridine phosphorothioate linkage
  modified_base 21: mod_base = OTHER; note = 2' O-methyl modified nucleoside - 2' O-methyluridine
ttgctgttgccttaagttgtt

SEQ ID NO: 26016 - RNA, 21 nt, synthetic construct
  source 1..21: mol_type = other RNA; note = Description of Artificial Sequence: Synthetic oligonucleotide
  modified_base 1: mod_base = OTHER; note = 2' O-methyl modified nucleoside - 2' O-methyluridine phosphorothioate linkage
  modified_base 2: mod_base = OTHER; note = 2' fluoro-modified nucleoside - 2' fluorocytidine phosphorothioate linkage
  modified_base 3: mod_base = OTHER; note = 2' O-methyl modified nucleoside - 2' O-methyladenosine
  modified_base 4: mod_base = OTHER; note = 2' fluoro-modified nucleoside - 2' fluorouridine
  modified_base 5: mod_base = OTHER; note = 2' O-methyl modified nucleoside - 2' O-methylguanosine
  modified_base 6: mod_base = OTHER; note = 2' fluoro-modified nucleoside - 2' fluorocytidine
  modified_base 7: mod_base = OTHER; note = 2' O-methyl modified nucleoside - 2' O-methyluridine
  modified_base 8: mod_base = OTHER; note = 2' fluoro-modified nucleoside - 2' fluoroguanosine
  modified_base 9: mod_base = OTHER; note = 2' O-methyl modified nucleoside - 2' O-methyluridine
  modified_base 10: mod_base = OTHER; note = 2' fluoro-modified nucleoside - 2' fluorouridine
  modified_base 11: mod_base = OTHER; note = 2' O-methyl modified nucleoside - 2' O-methylguanosine
  modified_base 12: mod_base = OTHER; note = 2' O-methyl modified nucleoside - 2' O-methylcytidine
  modified_base 13: mod_base = OTHER; note = 2' O-methyl modified nucleoside - 2' O-methylcytidine
  modified_base 14: mod_base = OTHER; note = 2' fluoro-modified nucleoside - 2' fluorouridine
  modified_base 15: mod_base = OTHER; note = 2' O-methyl modified nucleoside - 2' O-methyluridine
  modified_base 16: mod_base = OTHER; note = 2' fluoro-modified nucleoside - 2' fluoroadenosine
  modified_base 17: mod_base = OTHER; note = 2' O-methyl modified nucleoside - 2' O-methyladenosine
  modified_base 18: mod_base = OTHER; note = 2' fluoro-modified nucleoside - 2' fluoroguanosine
  modified_base 19: mod_base = OTHER; note = 2' O-methyl modified nucleoside - 2' O-methyluridine phosphorothioate linkage
  modified_base 20: mod_base = OTHER; note = 2' O-methyl modified nucleoside - 2' O-methyluridine phosphorothioate linkage
  modified_base 21: mod_base = OTHER; note = 2' O-methyl modified nucleoside - 2' O-methyluridine
tcatgctgttgccttaagttt

SEQ ID NO: 26017 - RNA, 21 nt, synthetic construct
  source 1..21: mol_type = other RNA; note = Description of Artificial Sequence: Synthetic oligonucleotide
  modified_base 1: mod_base = OTHER; note = 2' O-methyl modified nucleoside - 2' O-methyluridine phosphorothioate linkage
  modified_base 2: mod_base = OTHER; note = 2' fluoro-modified nucleoside - 2' fluoroadenosine phosphorothioate linkage
  modified_base 3: mod_base = OTHER; note = 2' O-methyl modified nucleoside - 2' O-methyluridine
  modified_base 4: mod_base = OTHER; note = 2' fluoro-modified nucleoside - 2' fluorouridine
  modified_base 5: mod_base = OTHER; note = 2' O-methyl modified nucleoside - 2' O-methylcytidine
  modified_base 6: mod_base = OTHER; note = 2' fluoro-modified nucleoside - 2' fluoroadenosine
  modified_base 7: mod_base = OTHER; note = 2' O-methyl modified nucleoside - 2' O-methylcytidine
  modified_base 8: mod_base = OTHER; note = 2' fluoro-modified nucleoside - 2' fluorocytidine
  modified_base 9: mod_base = OTHER; note = 2' O-methyl modified nucleoside - 2' O-methylcytidine
  modified_base 10: mod_base = OTHER; note = 2' fluoro-modified nucleoside - 2' fluoroadenosine
  modified_base 11: mod_base = OTHER; note = 2' O-methyl modified nucleoside - 2' O-methyluridine
  modified_base 12: mod_base = OTHER; note = 2' O-methyl modified nucleoside - 2' O-methylguanosine
  modified_base 13: mod_base = OTHER; note = 2' O-methyl modified nucleoside - 2' O-methylcytidine
  modified_base 14: mod_base = OTHER; note = 2' fluoro-modified nucleoside - 2' fluorouridine
  modified_base 15: mod_base = OTHER; note = 2' O-methyl modified nucleoside - 2' O-methylguanosine
  modified_base 16: mod_base = OTHER; note = 2' fluoro-modified nucleoside - 2' fluorouridine
  modified_base 17: mod_base = OTHER; note = 2' O-methyl modified nucleoside - 2' O-methyluridine
  modified_base 18: mod_base = OTHER; note = 2' fluoro-modified nucleoside - 2' fluoroguanosine
  modified_base 19: mod_base = OTHER; note = 2' O-methyl modified nucleoside - 2' O-methylcytidine phosphorothioate linkage
  modified_base 20: mod_base = OTHER; note = 2' O-methyl modified nucleoside - 2' O-methyluridine phosphorothioate linkage
  modified_base 21: mod_base = OTHER; note = 2' O-methyl modified nucleoside - 2' O-methyluridine
tattcacccatgctgttgctt

SEQ ID NO: 26018 - RNA, 21 nt, synthetic construct
  source 1..21: mol_type = other RNA; note = Description of Artificial Sequence: Synthetic oligonucleotide
  modified_base 1: mod_base = OTHER; note = 2' O-methyl modified nucleoside - 2' O-methyluridine phosphorothioate linkage
  modified_base 2: mod_base = OTHER; note = 2' fluoro-modified nucleoside - 2' fluorouridine phosphorothioate linkage
  modified_base 3: mod_base = OTHER; note = 2' O-methyl modified nucleoside - 2' O-methyluridine
  modified_base 4: mod_base = OTHER; note = 2' fluoro-modified nucleoside - 2' fluoroadenosine
  modified_base 5: mod_base = OTHER; note = 2' O-methyl modified nucleoside - 2' O-methyluridine
  modified_base 6: mod_base = OTHER; note = 2' fluoro-modified nucleoside - 2' fluorouridine
  modified_base 7: mod_base = OTHER; note = 2' O-methyl modified nucleoside - 2' O-methylcytidine
  modified_base 8: mod_base = OTHER; note = 2' fluoro-modified nucleoside - 2' fluoroadenosine
  modified_base 9: mod_base = OTHER; note = 2' O-methyl modified nucleoside - 2' O-methylcytidine
  modified_base 10: mod_base = OTHER; note = 2' fluoro-modified nucleoside - 2' fluorocytidine
  modified_base 11: mod_base = OTHER; note = 2' O-methyl modified nucleoside - 2' O-methylcytidine
  modified_base 12: mod_base = OTHER; note = 2' O-methyl modified nucleoside - 2' O-methyladenosine
  modified_base 13: mod_base = OTHER; note = 2' O-methyl modified nucleoside - 2' O-methyluridine
  modified_base 14: mod_base = OTHER; note = 2' fluoro-modified nucleoside - 2' fluoroguanosine
  modified_base 15: mod_base = OTHER; note = 2' O-methyl modified nucleoside - 2' O-methylcytidine
  modified_base 16: mod_base = OTHER; note = 2' fluoro-modified nucleoside - 2' fluorouridine
  modified_base 17: mod_base = OTHER; note = 2' O-methyl modified nucleoside - 2' O-methylguanosine
  modified_base 18: mod_base = OTHER; note = 2' fluoro-modified nucleoside - 2' fluorouridine
  modified_base 19: mod_base = OTHER; note = 2' O-methyl modified nucleoside - 2' O-methyluridine phosphorothioate linkage
  modified_base 20: mod_base = OTHER; note = 2' O-methyl modified nucleoside - 2' O-methyluridine phosphorothioate linkage
  modified_base 21: mod_base = OTHER; note = 2' O-methyl modified nucleoside - 2' O-methyluridine
tttattcacccatgctgtttt

SEQ ID NO: 26019 - RNA, 21 nt, synthetic construct
  source 1..21: mol_type = other RNA; note = Description of Artificial Sequence: Synthetic oligonucleotide
  modified_base 1: mod_base = OTHER; note = 2' O-methyl modified nucleoside - 2' O-methyluridine phosphorothioate linkage
  modified_base 2: mod_base = OTHER; note = 2' fluoro-modified nucleoside - 2' fluorocytidine phosphorothioate linkage
  modified_base 3: mod_base = OTHER; note = 2' O-methyl modified nucleoside - 2' O-methyluridine
  modified_base 4: mod_base = OTHER; note = 2' fluoro-modified nucleoside - 2' fluorouridine
  modified_base 5: mod_base = OTHER; note = 2' O-methyl modified nucleoside - 2' O-methyladenosine
  modified_base 6: mod_base = OTHER; note = 2' fluoro-modified nucleoside - 2' fluorouridine
  modified_base 7: mod_base = OTHER; note = 2' O-methyl modified nucleoside - 2' O-methyluridine
  modified_base 8: mod_base = OTHER; note = 2' fluoro-modified nucleoside - 2' fluorocytidine
  modified_base 9: mod_base = OTHER; note = 2' O-methyl modified nucleoside - 2' O-methyladenosine
  modified_base 10: mod_base = OTHER; note = 2' fluoro-modified nucleoside - 2' fluorocytidine
  modified_base 11: mod_base = OTHER; note = 2' O-methyl modified nucleoside - 2' O-methylcytidine
  modified_base 12: mod_base = OTHER; note = 2' O-methyl modified nucleoside - 2' O-methylcytidine
  modified_base 13: mod_base = OTHER; note = 2' O-methyl modified nucleoside - 2' O-methyladenosine
  modified_base 14: mod_base = OTHER; note = 2' fluoro-modified nucleoside - 2' fluorouridine
  modified_base 15: mod_base = OTHER; note = 2' O-methyl modified nucleoside - 2' O-methylguanosine
  modified_base 16: mod_base = OTHER; note = 2' fluoro-modified nucleoside - 2' fluorocytidine
  modified_base 17: mod_base = OTHER; note = 2' O-methyl modified nucleoside - 2' O-methyluridine
  modified_base 18: mod_base = OTHER; note = 2' fluoro-modified nucleoside - 2' fluoroguanosine
  modified_base 19: mod_base = OTHER; note = 2' O-methyl modified nucleoside - 2' O-methyluridine phosphorothioate linkage
  modified_base 20: mod_base = OTHER; note = 2' O-methyl modified nucleoside - 2' O-methyluridine phosphorothioate linkage
  modified_base 21: mod_base = OTHER; note = 2' O-methyl modified nucleoside - 2' O-methyluridine
tcttattcacccatgctgttt

SEQ ID NO: 26020 - RNA, 21 nt, synthetic construct
  source 1..21: mol_type = other RNA; note = Description of Artificial Sequence: Synthetic oligonucleotide
  modified_base 1: mod_base = OTHER; note = 2' O-methyl modified nucleoside - 2' O-methyluridine phosphorothioate linkage
  modified_base 2: mod_base = OTHER; note = 2' fluoro-modified nucleoside - 2' fluorocytidine phosphorothioate linkage
  modified_base 3: mod_base = OTHER; note = 2' O-methyl modified nucleoside - 2' O-methylcytidine
  modified_base 4: mod_base = OTHER; note = 2' fluoro-modified nucleoside - 2' fluorouridine
  modified_base 5: mod_base = OTHER; note = 2' O-methyl modified nucleoside - 2' O-methyluridine
  modified_base 6: mod_base = OTHER; note = 2' fluoro-modified nucleoside - 2' fluoroadenosine
  modified_base 7: mod_base = OTHER; note = 2' O-methyl modified nucleoside - 2' O-methyluridine
  modified_base 8: mod_base = OTHER; note = 2' fluoro-modified nucleoside - 2' fluorouridine
  modified_base 9: mod_base = OTHER; note = 2' O-methyl modified nucleoside - 2' O-methylcytidine
  modified_base 10: mod_base = OTHER; note = 2' fluoro-modified nucleoside - 2' fluoroadenosine
  modified_base 11: mod_base = OTHER; note = 2' O-methyl modified nucleoside - 2' O-methylcytidine
  modified_base 12: mod_base = OTHER; note = 2' O-methyl modified nucleoside - 2' O-methylcytidine
  modified_base 13: mod_base = OTHER; note = 2' O-methyl modified nucleoside - 2' O-methylcytidine
  modified_base 14: mod_base = OTHER; note = 2' fluoro-modified nucleoside - 2' fluoroadenosine
  modified_base 15: mod_base = OTHER; note = 2' O-methyl modified nucleoside - 2' O-methyluridine
  modified_base 16: mod_base = OTHER; note = 2' fluoro-modified nucleoside - 2' fluoroguanosine
  modified_base 17: mod_base = OTHER; note = 2' O-methyl modified nucleoside - 2' O-methylcytidine
  modified_base 18: mod_base = OTHER; note = 2' fluoro-modified nucleoside - 2' fluorouridine
  modified_base 19: mod_base = OTHER; note = 2' O-methyl modified nucleoside - 2' O-methylguanosine phosphorothioate linkage
  modified_base 20: mod_base = OTHER; note = 2' O-methyl modified nucleoside - 2' O-methyluridine phosphorothioate linkage
  modified_base 21: mod_base = OTHER; note = 2' O-methyl modified nucleoside - 2' O-methyluridine
tccttattcacccatgctgtt

SEQ ID NO: 26021 - RNA, 21 nt, synthetic construct
  source 1..21: mol_type = other RNA; note = Description of Artificial Sequence: Synthetic oligonucleotide
  modified_base 1: mod_base = OTHER; note = 2' O-methyl modified nucleoside - 2' O-methyluridine phosphorothioate linkage
  modified_base 2: mod_base = OTHER; note = 2' fluoro-modified nucleoside - 2' fluorocytidine phosphorothioate linkage
  modified_base 3: mod_base = OTHER; note = 2' O-methyl modified nucleoside - 2' O-methylcytidine
  modified_base 4: mod_base = OTHER; note = 2' fluoro-modified nucleoside - 2' fluorocytidine
  modified_base 5: mod_base = OTHER; note = 2' O-methyl modified nucleoside - 2' O-methyluridine
  modified_base 6: mod_base = OTHER; note = 2' fluoro-modified nucleoside - 2' fluorouridine
  modified_base 7: mod_base = OTHER; note = 2' O-methyl modified nucleoside - 2' O-methyladenosine
  modified_base 8: mod_base = OTHER; note = 2' fluoro-modified nucleoside - 2' fluorouridine
  modified_base 9: mod_base = OTHER; note = 2' O-methyl modified nucleoside - 2' O-methyluridine
  modified_base 10: mod_base = OTHER; note = 2' fluoro-modified nucleoside - 2' fluorocytidine
  modified_base 11: mod_base = OTHER; note = 2' O-methyl modified nucleoside - 2' O-methyladenosine
  modified_base 12: mod_base = OTHER; note = 2' O-methyl modified nucleoside - 2' O-methylcytidine
  modified_base 13: mod_base = OTHER; note = 2' O-methyl modified nucleoside - 2' O-methylcytidine
  modified_base 14: mod_base = OTHER; note = 2' fluoro-modified nucleoside - 2' fluorocytidine
  modified_base 15: mod_base = OTHER; note = 2' O-methyl modified nucleoside - 2' O-methyladenosine
  modified_base 16: mod_base = OTHER; note = 2' fluoro-modified nucleoside - 2' fluorouridine
  modified_base 17: mod_base = OTHER; note = 2' O-methyl modified nucleoside - 2' O-methylguanosine
  modified_base 18: mod_base = OTHER; note = 2' fluoro-modified nucleoside - 2' fluorocytidine
  modified_base 19: mod_base = OTHER; note = 2' O-methyl modified nucleoside - 2' O-methyluridine phosphorothioate linkage
  modified_base 20: mod_base = OTHER; note = 2' O-methyl modified nucleoside - 2' O-methyluridine phosphorothioate linkage
  modified_base 21: mod_base = OTHER; note = 2' O-methyl modified nucleoside - 2' O-methyluridine
tcccttattcacccatgcttt

SEQ ID NO: 26022 - RNA, 21 nt, synthetic construct
  source 1..21: mol_type = other RNA; note = Description of Artificial Sequence: Synthetic oligonucleotide
  modified_base 1: mod_base = OTHER; note = 2' O-methyl modified nucleoside - 2' O-methyluridine phosphorothioate linkage
  modified_base 2: mod_base = OTHER; note = 2' fluoro-modified nucleoside - 2' fluorouridine phosphorothioate linkage
  modified_base 3: mod_base = OTHER; note = 2' O-methyl modified nucleoside - 2' O-methylcytidine
  modified_base 4: mod_base = OTHER; note = 2' fluoro-modified nucleoside - 2' fluorocytidine
  modified_base 5: mod_base = OTHER; note = 2' O-methyl modified nucleoside - 2' O-methyladenosine
  modified_base 6: mod_base = OTHER; note = 2' fluoro-modified nucleoside - 2' fluorocytidine
  modified_base 7: mod_base = OTHER; note = 2' O-methyl modified nucleoside - 2' O-methyladenosine
  modified_base 8: mod_base = OTHER; note = 2' fluoro-modified nucleoside - 2' fluoroguanosine
  modified_base 9: mod_base = OTHER; note = 2' O-methyl modified nucleoside - 2' O-methylguanosine
  modified_base 10: mod_base = OTHER; note = 2' fluoro-modified nucleoside - 2' fluoroadenosine
  modified_base 11: mod_base = OTHER; note = 2' O-methyl modified nucleoside - 2' O-methyladenosine
  modified_base 12: mod_base = OTHER; note = 2' O-methyl modified nucleoside - 2' O-methylguanosine
  modified_base 13: mod_base = OTHER; note = 2' O-methyl modified nucleoside - 2' O-methylcytidine
  modified_base 14: mod_base = OTHER; note = 2' fluoro-modified nucleoside - 2' fluorocytidine
  modified_base 15: mod_base = OTHER; note = 2' O-methyl modified nucleoside - 2' O-methylcytidine
  modified_base 16: mod_base = OTHER; note = 2' fluoro-modified nucleoside - 2' fluorouridine
  modified_base 17: mod_base = OTHER; note = 2' O-methyl modified nucleoside - 2' O-methyluridine
  modified_base 18: mod_base = OTHER; note = 2' fluoro-modified nucleoside - 2' fluoroadenosine
  modified_base 19: mod_base = OTHER; note = 2' O-methyl modified nucleoside - 2' O-methyluridine phosphorothioate linkage
  modified_base 20: mod_base = OTHER; note = 2' O-methyl modified nucleoside - 2' O-methyluridine phosphorothioate linkage
  modified_base 21: mod_base = OTHER; note = 2' O-methyl modified nucleoside - 2' O-methyluridine
ttccacaggaagcccttattt

SEQ ID NO: 26023 - RNA, 21 nt, synthetic construct
  source 1..21: mol_type = other RNA; note = Description of Artificial Sequence: Synthetic oligonucleotide
  modified_base 1: mod_base = OTHER; note = 2' O-methyl modified nucleoside - 2' O-methyluridine phosphorothioate linkage
  modified_base 2: mod_base = OTHER; note = 2' fluoro-modified nucleoside - 2' fluorouridine phosphorothioate linkage
  modified_base 3: mod_base = OTHER; note = 2' O-methyl modified nucleoside - 2' O-methylcytidine
  modified_base 4: mod_base = OTHER; note = 2' fluoro-modified nucleoside - 2' fluoroadenosine
  modified_base 5: mod_base = OTHER; note = 2' O-methyl modified nucleoside - 2' O-methyladenosine
  modified_base 6: mod_base = OTHER; note = 2' fluoro-modified nucleoside - 2' fluoroguanosine
  modified_base 7: mod_base = OTHER; note = 2' O-methyl modified nucleoside - 2' O-methylcytidine
  modified_base 8: mod_base = OTHER; note = 2' fluoro-modified nucleoside - 2' fluoroadenosine
  modified_base 9: mod_base = OTHER; note = 2' O-methyl modified nucleoside - 2' O-methylcytidine
  modified_base 10: mod_base = OTHER; note = 2' fluoro-modified nucleoside - 2' fluorocytidine
  modified_base 11: mod_base = OTHER; note = 2' O-methyl modified nucleoside - 2' O-methyladenosine
  modified_base 12: mod_base = OTHER; note = 2' O-methyl modified nucleoside - 2' O-methylguanosine
  modified_base 13: mod_base = OTHER; note = 2' O-methyl modified nucleoside - 2' O-methylguanosine
  modified_base 14: mod_base = OTHER; note = 2' fluoro-modified nucleoside - 2' fluorouridine
  modified_base 15: mod_base = OTHER; note = 2' O-methyl modified nucleoside - 2' O-methyluridine
  modified_base 16: mod_base = OTHER; note = 2' fluoro-modified nucleoside - 2' fluorouridine
  modified_base 17: mod_base = OTHER; note = 2' O-methyl modified nucleoside - 2' O-methyluridine
  modified_base 18: mod_base = OTHER; note = 2' fluoro-modified nucleoside - 2' fluoroguanosine
  modified_base 19: mod_base = OTHER; note = 2' O-methyl modified nucleoside - 2' O-methylcytidine phosphorothioate linkage
  modified_base 20: mod_base = OTHER; note = 2' O-methyl modified nucleoside - 2' O-methyluridine phosphorothioate linkage
  modified_base 21: mod_base = OTHER; note = 2' O-methyl modified nucleoside - 2' O-methyluridine
ttcaagcaccaggttttgctt

SEQ ID NO: 26024 - RNA, 21 nt, synthetic construct
  source 1..21: mol_type = other RNA; note = Description of Artificial Sequence: Synthetic oligonucleotide
  modified_base 1: mod_base = OTHER; note = 2' O-methyl modified nucleoside - 2' O-methyluridine phosphorothioate linkage
  modified_base 2: mod_base = OTHER; note = 2' fluoro-modified nucleoside - 2' fluorocytidine phosphorothioate linkage
  modified_base 3: mod_base = OTHER; note = 2' O-methyl modified nucleoside - 2' O-methyluridine
  modified_base 4: mod_base = OTHER; note = 2' fluoro-modified nucleoside - 2' fluorocytidine
  modified_base 5: mod_base = OTHER; note = 2' O-methyl modified nucleoside - 2' O-methyladenosine
  modified_base 6: mod_base = OTHER; note = 2' fluoro-modified nucleoside - 2' fluoroadenosine
  modified_base 7: mod_base = OTHER; note = 2' O-methyl modified nucleoside - 2' O-methylguanosine
  modified_base 8: mod_base = OTHER; note = 2' fluoro-modified nucleoside - 2' fluorocytidine
  modified_base 9: mod_base = OTHER; note = 2' O-methyl modified nucleoside - 2' O-methyladenosine
  modified_base 10: mod_base = OTHER; note = 2' fluoro-modified nucleoside - 2' fluorocytidine
  modified_base 11: mod_base = OTHER; note = 2' O-methyl modified nucleoside - 2' O-methylcytidine
  modified_base 12: mod_base = OTHER; note = 2' O-methyl modified nucleoside - 2' O-methyladenosine
  modified_base 13: mod_base = OTHER; note = 2' O-methyl modified nucleoside - 2' O-methylguanosine
  modified_base 14: mod_base = OTHER; note = 2' fluoro-modified nucleoside - 2' fluoroguanosine
  modified_base 15: mod_base = OTHER; note = 2' O-methyl modified nucleoside - 2' O-methyluridine
  modified_base 16: mod_base = OTHER; note = 2' fluoro-modified nucleoside - 2' fluorouridine
  modified_base 17: mod_base = OTHER; note = 2' O-methyl modified nucleoside - 2' O-methyluridine
  modified_base 18: mod_base = OTHER; note = 2' fluoro-modified nucleoside - 2' fluorouridine
  modified_base 19: mod_base = OTHER; note = 2' O-methyl modified nucleoside - 2' O-methylguanosine phosphorothioate linkage
  modified_base 20: mod_base = OTHER; note = 2' O-methyl modified nucleoside - 2' O-methyluridine phosphorothioate linkage
  modified_base 21: mod_base = OTHER; note = 2' O-methyl modified nucleoside - 2' O-methyluridine
tctcaagcaccaggttttgtt

SEQ ID NO: 26025 - RNA, 21 nt, synthetic construct
  source 1..21: mol_type = other RNA; note = Description of Artificial Sequence: Synthetic oligonucleotide
  modified_base 1: mod_base = OTHER; note = 2' O-methyl modified nucleoside - 2' O-methyluridine phosphorothioate linkage
  modified_base 2: mod_base = OTHER; note = 2' fluoro-modified nucleoside - 2' fluoroguanosine phosphorothioate linkage
  modified_base 3: mod_base = OTHER; note = 2' O-methyl modified nucleoside - 2' O-methylguanosine
  modified_base 4: mod_base = OTHER; note = 2' fluoro-modified nucleoside - 2' fluorocytidine
  modified_base 5: mod_base = OTHER; note = 2' O-methyl modified nucleoside - 2' O-methylcytidine
  modified_base 6: mod_base = OTHER; note = 2' fluoro-modified nucleoside - 2' fluoroadenosine
  modified_base 7: mod_base = OTHER; note = 2' O-methyl modified nucleoside - 2' O-methylguanosine
  modified_base 8: mod_base = OTHER; note = 2' fluoro-modified nucleoside - 2' fluorouridine
  modified_base 9: mod_base = OTHER; note = 2' O-methyl modified nucleoside - 2' O-methylguanosine
  modified_base 10: mod_base = OTHER; note = 2' fluoro-modified nucleoside - 2' fluorocytidine
  modified_base 11: mod_base = OTHER; note = 2' O-methyl modified nucleoside - 2' O-methyluridine
  modified_base 12: mod_base = OTHER; note = 2' O-methyl modified nucleoside - 2' O-methylcytidine
  modified_base 13: mod_base = OTHER; note = 2' O-methyl modified nucleoside - 2' O-methyladenosine
  modified_base 14: mod_base = OTHER; note = 2' fluoro-modified nucleoside - 2' fluoroadenosine
  modified_base 15: mod_base = OTHER; note = 2' O-methyl modified nucleoside - 2' O-methylguanosine
  modified_base 16: mod_base = OTHER; note = 2' fluoro-modified nucleoside - 2' fluorocytidine
  modified_base 17: mod_base = OTHER; note = 2' O-methyl modified nucleoside - 2' O-methyladenosine
  modified_base 18: mod_base = OTHER; note = 2' fluoro-modified nucleoside - 2' fluorocytidine
  modified_base 19: mod_base = OTHER; note = 2' O-methyl modified nucleoside - 2' O-methylcytidine phosphorothioate linkage
  modified_base 20: mod_base = OTHER; note = 2' O-methyl modified nucleoside - 2' O-methyluridine phosphorothioate linkage
  modified_base 21: mod_base = OTHER; note = 2' O-methyl modified nucleoside - 2' O-methyluridine
tggccagtgctcaagcacctt

SEQ ID NO: 26026 - RNA, 21 nt, synthetic construct
  source 1..21: mol_type = other RNA; note = Description of Artificial Sequence: Synthetic oligonucleotide
  modified_base 1: mod_base = OTHER; note = 2' O-methyl modified nucleoside - 2' O-methyluridine phosphorothioate linkage
  modified_base 2: mod_base = OTHER; note = 2' fluoro-modified nucleoside - 2' fluoroguanosine phosphorothioate linkage
  modified_base 3: mod_base = OTHER; note = 2' O-methyl modified nucleoside - 2' O-methyladenosine
  modified_base 4: mod_base = OTHER; note = 2' fluoro-modified nucleoside - 2' fluorouridine
  modified_base 5: mod_base = OTHER; note = 2' O-methyl modified nucleoside - 2' O-methylcytidine
  modified_base 6: mod_base = OTHER; note = 2' fluoro-modified nucleoside - 2' fluorouridine
  modified_base 7: mod_base = OTHER; note = 2' O-methyl modified nucleoside - 2' O-methylguanosine
  modified_base 8: mod_base = OTHER; note = 2' fluoro-modified nucleoside - 2' fluorouridine
  modified_base 9: mod_base = OTHER; note = 2' O-methyl modified nucleoside - 2' O-methyladenosine
  modified_base 10: mod_base = OTHER; note = 2' fluoro-modified nucleoside - 2' fluoroadenosine
  modified_base 11: mod_base = OTHER; note = 2' O-methyl modified nucleoside - 2' O-methylguanosine
  modified_base 12: mod_base = OTHER; note = 2' O-methyl modified nucleoside - 2' O-methylguanosine
  modified_base 13: mod_base = OTHER; note = 2' O-methyl modified nucleoside - 2' O-methylcytidine
  modified_base 14: mod_base = OTHER; note = 2' fluoro-modified nucleoside - 2' fluorocytidine
  modified_base 15: mod_base = OTHER; note = 2' O-methyl modified nucleoside - 2' O-methyluridine
  modified_base 16: mod_base = OTHER; note = 2' fluoro-modified nucleoside - 2' fluoroguanosine
  modified_base 17: mod_base = OTHER; note = 2' O-methyl modified nucleoside - 2' O-methylcytidine
  modified_base 18: mod_base = OTHER; note = 2' fluoro-modified nucleoside - 2' fluorocytidine
  modified_base 19: mod_base = OTHER; note = 2' O-methyl modified nucleoside - 2' O-methyluridine phosphorothioate linkage
  modified_base 20: mod_base = OTHER; note = 2' O-methyl modified nucleoside - 2' O-methyluridine phosphorothioate linkage
  modified_base 21: mod_base = OTHER; note = 2' O-methyl modified nucleoside - 2' O-methyluridine
tgatctgtaaggcctgccttt

SEQ ID NO: 26027 - RNA, 21 nt, synthetic construct
  source 1..21: mol_type = other RNA; note = Description of Artificial Sequence: Synthetic oligonucleotide
  modified_base 1: mod_base = OTHER; note = 2' O-methyl modified nucleoside - 2' O-methyluridine phosphorothioate linkage
  modified_base 2: mod_base = OTHER; note = 2' fluoro-modified nucleoside - 2' fluoroadenosine phosphorothioate linkage
  modified_base 3: mod_base = OTHER; note = 2' O-methyl modified nucleoside - 2' O-methyladenosine
  modified_base 4: mod_base = OTHER; note = 2' fluoro-modified nucleoside - 2' fluoroguanosine
  modified_base 5: mod_base = OTHER; note = 2' O-methyl modified nucleoside - 2' O-methyladenosine
  modified_base 6: mod_base = OTHER; note = 2' fluoro-modified nucleoside - 2' fluoroguanosine
  modified_base 7: mod_base = OTHER; note = 2' O-methyl modified nucleoside - 2' O-methyladenosine
  modified_base 8: mod_base = OTHER; note = 2' fluoro-modified nucleoside - 2' fluorouridine
  modified_base 9: mod_base = OTHER; note = 2' O-methyl modified nucleoside - 2' O-methylcytidine
  modified_base 10: mod_base = OTHER; note = 2' fluoro-modified nucleoside - 2' fluorouridine
  modified_base 11: mod_base = OTHER; note = 2' O-methyl modified nucleoside - 2' O-methylguanosine
  modified_base 12: mod_base = OTHER; note = 2' O-methyl modified nucleoside - 2' O-methyluridine
  modified_base 13: mod_base = OTHER; note = 2' O-methyl modified nucleoside - 2' O-methyladenosine
  modified_base 14: mod_base = OTHER; note = 2' fluoro-modified nucleoside - 2' fluoroadenosine
  modified_base 15: mod_base = OTHER; note = 2' O-methyl modified nucleoside - 2' O-methylguanosine
  modified_base 16: mod_base = OTHER; note = 2' fluoro-modified nucleoside - 2' fluoroguanosine
  modified_base 17: mod_base = OTHER; note = 2' O-methyl modified nucleoside - 2' O-methylcytidine
  modified_base 18: mod_base = OTHER; note = 2' fluoro-modified nucleoside - 2' fluorocytidine
  modified_base 19: mod_base = OTHER; note = 2' O-methyl modified nucleoside - 2' O-methyluridine phosphorothioate linkage
  modified_base 20: mod_base = OTHER; note = 2' O-methyl modified nucleoside - 2' O-methyluridine phosphorothioate linkage
  modified_base 21: mod_base = OTHER; note = 2' O-methyl modified nucleoside - 2' O-methyluridine
taagagatctgtaaggccttt

SEQ ID NO: 26028 - RNA, 21 nt, synthetic construct
  source 1..21: mol_type = other RNA; note = Description of Artificial Sequence: Synthetic oligonucleotide
  modified_base 1: mod_base = OTHER; note = 2' O-methyl modified nucleoside - 2' O-methyluridine phosphorothioate linkage
  modified_base 2: mod_base = OTHER; note = 2' fluoro-modified nucleoside - 2' fluorouridine phosphorothioate linkage
  modified_base 3: mod_base = OTHER; note = 2' O-methyl modified nucleoside - 2' O-methyladenosine
  modified_base 4: mod_base = OTHER; note = 2' fluoro-modified nucleoside - 2' fluoroadenosine
  modified_base 5: mod_base = OTHER; note = 2' O-methyl modified nucleoside - 2' O-methylguanosine
  modified_base 6: mod_base = OTHER; note = 2' fluoro-modified nucleoside - 2' fluoroadenosine
  modified_base 7: mod_base = OTHER; note = 2' O-methyl modified nucleoside - 2' O-methylguanosine
  modified_base 8: mod_base = OTHER; note = 2' fluoro-modified nucleoside - 2' fluoroadenosine
  modified_base 9: mod_base = OTHER; note = 2' O-methyl modified nucleoside - 2' O-methyluridine
  modified_base 10: mod_base = OTHER; note = 2' fluoro-modified nucleoside - 2' fluorocytidine
  modified_base 11: mod_base = OTHER; note = 2' O-methyl modified nucleoside - 2' O-methyluridine
  modified_base 12: mod_base = OTHER; note = 2' O-methyl modified nucleoside - 2' O-methylguanosine
  modified_base 13: mod_base = OTHER; note = 2' O-methyl modified nucleoside - 2' O-methyluridine
  modified_base 14: mod_base = OTHER; note = 2' fluoro-modified nucleoside - 2' fluoroadenosine
  modified_base 15: mod_base = OTHER; note = 2' O-methyl modified nucleoside - 2' O-methyladenosine
  modified_base 16: mod_base = OTHER; note = 2' fluoro-modified nucleoside - 2' fluoroguanosine
  modified_base 17: mod_base = OTHER; note = 2' O-methyl modified nucleoside - 2' O-methylguanosine
  modified_base 18: mod_base = OTHER; note = 2' fluoro-modified nucleoside - 2' fluorocytidine
  modified_base 19: mod_base = OTHER; note = 2' O-methyl modified nucleoside - 2' O-methylcytidine phosphorothioate linkage
  modified_base 20: mod_base = OTHER; note = 2' O-methyl modified nucleoside - 2' O-methyluridine phosphorothioate linkage
  modified_base 21: mod_base = OTHER; note = 2' O-methyl modified nucleoside - 2' O-methyluridine
ttaagagatctgtaaggcctt

SEQ ID NO: 26029 - RNA, 21 nt, synthetic construct
  source 1..21: mol_type = other RNA; note = Description of Artificial Sequence: Synthetic oligonucleotide
  modified_base 1: mod_base = OTHER; note = 2' O-methyl modified nucleoside - 2' O-methyluridine phosphorothioate linkage
  modified_base 2: mod_base = OTHER; note = 2' fluoro-modified nucleoside - 2' fluoroguanosine phosphorothioate linkage
  modified_base 3: mod_base = OTHER; note = 2' O-methyl modified nucleoside - 2' O-methyluridine
  modified_base 4: mod_base = OTHER; note = 2' fluoro-modified nucleoside - 2' fluoroadenosine
  modified_base 5: mod_base = OTHER; note = 2' O-methyl modified nucleoside - 2' O-methyladenosine
  modified_base 6: mod_base = OTHER; note = 2' fluoro-modified nucleoside - 2' fluoroguanosine
  modified_base 7: mod_base = OTHER; note = 2' O-methyl modified nucleoside - 2' O-methyladenosine
  modified_base 8: mod_base = OTHER; note = 2' fluoro-modified nucleoside - 2' fluoroguanosine
  modified_base 9: mod_base = OTHER; note = 2' O-methyl modified nucleoside - 2' O-methyladenosine
  modified_base 10: mod_base = OTHER; note = 2' fluoro-modified nucleoside - 2' fluorouridine
  modified_base 11: mod_base = OTHER; note = 2' O-methyl modified nucleoside - 2' O-methylcytidine
  modified_base 12: mod_base = OTHER; note = 2' O-methyl modified nucleoside - 2' O-methyluridine
  modified_base 13: mod_base = OTHER; note = 2' O-methyl modified nucleoside - 2' O-methylguanosine
  modified_base 14: mod_base = OTHER; note = 2' fluoro-modified nucleoside - 2' fluorouridine
  modified_base 15: mod_base = OTHER; note = 2' O-methyl modified nucleoside - 2' O-methyladenosine
  modified_base 16: mod_base = OTHER; note = 2' fluoro-modified nucleoside - 2' fluoroadenosine
  modified_base 17: mod_base = OTHER; note = 2' O-methyl modified nucleoside - 2' O-methylguanosine
  modified_base 18: mod_base = OTHER; note = 2' fluoro-modified nucleoside - 2' fluoroguanosine
  modified_base 19: mod_base = OTHER; note = 2' O-methyl modified nucleoside - 2' O-methylcytidine phosphorothioate linkage
  modified_base 20: mod_base = OTHER; note = 2' O-methyl modified nucleoside - 2' O-methyluridine phosphorothioate linkage
  modified_base 21: mod_base = OTHER; note = 2' O-methyl modified nucleoside - 2' O-methyluridine
tgtaagagatctgtaaggctt

SEQ ID NO: 26030 - RNA, 21 nt, synthetic construct
  source 1..21: mol_type = other RNA; note = Description of Artificial Sequence: Synthetic oligonucleotide
  modified_base 1: mod_base = OTHER; note = 2' O-methyl modified nucleoside - 2' O-methyluridine phosphorothioate linkage
  modified_base 2: mod_base = OTHER; note = 2' fluoro-modified nucleoside - 2' fluoroguanosine phosphorothioate linkage
  modified_base 3: mod_base = OTHER; note = 2' O-methyl modified nucleoside - 2' O-methyluridine
  modified_base 4: mod_base = OTHER; note = 2' fluoro-modified nucleoside - 2' fluoroguanosine
  modified_base 5: mod_base = OTHER; note = 2' O-methyl modified nucleoside - 2' O-methyluridine
  modified_base 6: mod_base = OTHER; note = 2' fluoro-modified nucleoside - 2' fluoroadenosine
  modified_base 7: mod_base = OTHER; note = 2' O-methyl modified nucleoside - 2' O-methyladenosine
  modified_base 8: mod_base = OTHER; note = 2' fluoro-modified nucleoside - 2' fluoroguanosine
  modified_base 9: mod_base = OTHER; note = 2' O-methyl modified nucleoside - 2' O-methyladenosine
  modified_base 10: mod_base = OTHER; note = 2' fluoro-modified nucleoside - 2' fluoroguanosine
  modified_base 11: mod_base = OTHER; note = 2' O-methyl modified nucleoside - 2' O-methyladenosine
  modified_base 12: mod_base = OTHER; note = 2' O-methyl modified nucleoside - 2' O-methyluridine
  modified_base 13: mod_base = OTHER; note = 2' O-methyl modified nucleoside - 2' O-methylcytidine
  modified_base 14: mod_base = OTHER; note = 2' fluoro-modified nucleoside - 2' fluorouridine
  modified_base 15: mod_base = OTHER; note = 2' O-methyl modified nucleoside - 2' O-methylguanosine
  modified_base 16: mod_base = OTHER; note = 2' fluoro-modified nucleoside - 2' fluorouridine
  modified_base 17: mod_base = OTHER; note = 2' O-methyl modified nucleoside - 2' O-methyladenosine
  modified_base 18: mod_base = OTHER; note = 2' fluoro-modified nucleoside - 2' fluoroadenosine
  modified_base 19: mod_base = OTHER; note = 2' O-methyl modified nucleoside - 2' O-methylguanosine phosphorothioate linkage
  modified_base 20: mod_base = OTHER; note = 2' O-methyl modified nucleoside - 2' O-methyluridine phosphorothioate linkage
  modified_base 21: mod_base = OTHER; note = 2' O-methyl modified nucleoside - 2' O-methyluridine
tgtgtaagagatctgtaagtt

SEQ ID NO: 26031 - RNA, 21 nt, synthetic construct
  source 1..21: mol_type = other RNA; note = Description of Artificial Sequence: Synthetic oligonucleotide
  modified_base 1: mod_base = OTHER; note = 2' O-methyl modified nucleoside - 2' O-methyluridine phosphorothioate linkage
  modified_base 2: mod_base = OTHER; note = 2' fluoro-modified nucleoside - 2' fluoroadenosine phosphorothioate linkage
  modified_base 3: mod_base = OTHER; note = 2' O-methyl modified nucleoside - 2' O-methylcytidine
  modified_base 4: mod_base = OTHER; note = 2' fluoro-modified nucleoside - 2' fluoroguanosine
  modified_base 5: mod_base = OTHER; note = 2' O-methyl modified nucleoside - 2' O-methyladenosine
  modified_base 6: mod_base = OTHER; note = 2' fluoro-modified nucleoside - 2' fluoroguanosine
  modified_base 7: mod_base = OTHER; note = 2' O-methyl modified nucleoside - 2' O-methyluridine
  modified_base 8: mod_base = OTHER; note = 2' fluoro-modified nucleoside - 2' fluoroguanosine
  modified_base 9: mod_base = OTHER; note = 2' O-methyl modified nucleoside - 2' O-methyluridine
  modified_base 10: mod_base = OTHER; note = 2' fluoro-modified nucleoside - 2' fluoroadenosine
  modified_base 11: mod_base = OTHER; note = 2' O-methyl modified nucleoside - 2' O-methyladenosine
  modified_base 12: mod_base = OTHER; note = 2' O-methyl modified nucleoside - 2' O-methylguanosine
  modified_base 13: mod_base = OTHER; note = 2' O-methyl modified nucleoside - 2' O-methyladenosine
  modified_base 14: mod_base = OTHER; note = 2' fluoro-modified nucleoside - 2' fluoroguanosine
  modified_base 15: mod_base = OTHER; note = 2' O-methyl modified nucleoside - 2' O-methyladenosine
  modified_base 16: mod_base = OTHER; note = 2' fluoro-modified nucleoside - 2' fluorouridine
  modified_base 17: mod_base = OTHER; note = 2' O-methyl modified nucleoside - 2' O-methylcytidine
  modified_base 18: mod_base = OTHER; note = 2' fluoro-modified nucleoside - 2' fluorouridine
  modified_base 19: mod_base = OTHER; note = 2' O-methyl modified nucleoside - 2' O-methylguanosine phosphorothioate linkage
  modified_base 20: mod_base = OTHER; note = 2' O-methyl modified nucleoside - 2' O-methyluridine phosphorothioate linkage
  modified_base 21: mod_base = OTHER; note = 2' O-methyl modified nucleoside - 2' O-methyluridine
tacgagtgtaagagatctgtt

SEQ ID NO: 26032 - RNA, 21 nt, synthetic construct
  source 1..21: mol_type = other RNA; note = Description of Artificial Sequence: Synthetic oligonucleotide
  modified_base 1: mod_base = OTHER; note = 2' O-methyl modified nucleoside - 2' O-methyluridine phosphorothioate linkage
  modified_base 2: mod_base = OTHER; note = 2' fluoro-modified nucleoside - 2' fluorocytidine phosphorothioate linkage
  modified_base 3: mod_base = OTHER; note = 2' O-methyl modified nucleoside - 2' O-methyladenosine
  modified_base 4: mod_base = OTHER; note = 2' fluoro-modified nucleoside - 2' fluorocytidine
  modified_base 5: mod_base = OTHER; note = 2' O-methyl modified nucleoside - 2' O-methylguanosine
  modified_base 6: mod_base = OTHER; note = 2' fluoro-modified nucleoside - 2' fluoroadenosine
  modified_base 7: mod_base = OTHER; note = 2' O-methyl modified nucleoside - 2' O-methylguanosine
  modified_base 8: mod_base = OTHER; note = 2' fluoro-modified nucleoside - 2' fluorouridine
  modified_base 9: mod_base = OTHER; note = 2' O-methyl modified nucleoside - 2' O-methylguanosine
  modified_base 10: mod_base = OTHER; note = 2' fluoro-modified nucleoside - 2' fluorouridine
  modified_base 11: mod_base = OTHER; note = 2' O-methyl modified nucleoside - 2' O-methyladenosine
  modified_base 12: mod_base = OTHER; note = 2' O-methyl modified nucleoside - 2' O-methyladenosine
  modified_base 13: mod_base = OTHER; note = 2' O-methyl modified nucleoside - 2' O-methylguanosine
  modified_base 14: mod_base = OTHER; note = 2' fluoro-modified nucleoside - 2' fluoroadenosine
  modified_base 15: mod_base = OTHER; note = 2' O-methyl modified nucleoside - 2' O-methylguanosine
  modified_base 16: mod_base = OTHER; note = 2' fluoro-modified nucleoside - 2' fluoroadenosine
  modified_base 17: mod_base = OTHER; note = 2' O-methyl modified nucleoside - 2' O-methyluridine
  modified_base 18: mod_base = OTHER; note = 2' fluoro-modified nucleoside - 2' fluorocytidine
  modified_base 19: mod_base = OTHER; note = 2' O-methyl modified nucleoside - 2' O-methyluridine phosphorothioate linkage
  modified_base 20: mod_base = OTHER; note = 2' O-methyl modified nucleoside - 2' O-methyluridine phosphorothioate linkage
  modified_base 21: mod_base = OTHER; note = 2' O-methyl modified nucleoside - 2' O-methyluridine
tcacgagtgtaagagatcttt

SEQ ID NO: 26033 - RNA, 21 nt, synthetic construct
  source 1..21: mol_type = other RNA; note = Description of Artificial Sequence: Synthetic oligonucleotide
  modified_base 1: mod_base = OTHER; note = 2' O-methyl modified nucleoside - 2' O-methyluridine phosphorothioate linkage
  modified_base 2: mod_base = OTHER; note = 2' fluoro-modified nucleoside - 2' fluorocytidine phosphorothioate linkage
  modified_base 3: mod_base = OTHER; note = 2' O-methyl modified nucleoside - 2' O-methylcytidine
  modified_base 4: mod_base = OTHER; note = 2' fluoro-modified nucleoside - 2' fluoroadenosine
  modified_base 5: mod_base = OTHER; note = 2' O-methyl modified nucleoside - 2' O-methylcytidine
  modified_base 6: mod_base = OTHER; note = 2' fluoro-modified nucleoside - 2' fluoroguanosine
  modified_base 7: mod_base = OTHER; note = 2' O-methyl modified nucleoside - 2' O-methyladenosine
  modified_base 8: mod_base = OTHER; note = 2' fluoro-modified nucleoside - 2' fluoroguanosine
  modified_base 9: mod_base = OTHER; note = 2' O-methyl modified nucleoside - 2' O-methyluridine
  modified_base 10: mod_base = OTHER; note = 2' fluoro-modified nucleoside - 2' fluoroguanosine
  modified_base 11: mod_base = OTHER; note = 2' O-methyl modified nucleoside - 2' O-methyluridine
  modified_base 12: mod_base = OTHER; note = 2' O-methyl modified nucleoside - 2' O-methyladenosine
  modified_base 13: mod_base = OTHER; note = 2' O-methyl modified nucleoside - 2' O-methyladenosine
  modified_base 14: mod_base = OTHER; note = 2' fluoro-modified nucleoside - 2' fluoroguanosine
  modified_base 15: mod_base = OTHER; note = 2' O-methyl modified nucleoside - 2' O-methyladenosine
  modified_base 16: mod_base = OTHER; note = 2' fluoro-modified nucleoside - 2' fluoroguanosine
  modified_base 17: mod_base = OTHER; note = 2' O-methyl modified nucleoside - 2' O-methyladenosine
  modified_base 18: mod_base = OTHER; note = 2' fluoro-modified nucleoside - 2' fluorouridine
  modified_base 19: mod_base = OTHER; note = 2' O-methyl modified nucleoside - 2' O-methylcytidine phosphorothioate linkage
  modified_base 20: mod_base = OTHER; note = 2' O-methyl modified nucleoside - 2' O-methyluridine phosphorothioate linkage
  modified_base 21: mod_base = OTHER; note = 2' O-methyl modified nucleoside - 2' O-methyluridine
tccacgagtgtaagagatctt

SEQ ID NO: 26034 - RNA, 21 nt, synthetic construct
  source 1..21: mol_type = other RNA; note = Description of Artificial Sequence: Synthetic oligonucleotide
  modified_base 1: mod_base = OTHER; note = 2' O-methyl modified nucleoside - 2' O-methyluridine phosphorothioate linkage
  modified_base 2: mod_base = OTHER; note = 2' fluoro-modified nucleoside - 2' fluoroadenosine phosphorothioate linkage
  modified_base 3: mod_base = OTHER; note = 2' O-methyl modified nucleoside - 2' O-methylcytidine
  modified_base 4: mod_base = OTHER; note = 2' fluoro-modified nucleoside - 2' fluorocytidine
  modified_base 5: mod_base = OTHER; note = 2' O-methyl modified nucleoside - 2' O-methyladenosine
  modified_base 6: mod_base = OTHER; note = 2' fluoro-modified nucleoside - 2' fluorocytidine
  modified_base 7: mod_base = OTHER; note = 2' O-methyl modified nucleoside - 2' O-methylguanosine
  modified_base 8: mod_base = OTHER; note = 2' fluoro-modified nucleoside - 2' fluoroadenosine
  modified_base 9: mod_base = OTHER; note = 2' O-methyl modified nucleoside - 2' O-methylguanosine
  modified_base 10: mod_base = OTHER; note = 2' fluoro-modified nucleoside - 2' fluorouridine
  modified_base 11: mod_base = OTHER; note = 2' O-methyl modified nucleoside - 2' O-methylguanosine
  modified_base 12: mod_base = OTHER; note = 2' O-methyl modified nucleoside - 2' O-methyluridine
  modified_base 13: mod_base = OTHER; note = 2' O-methyl modified nucleoside - 2' O-methyladenosine
  modified_base 14: mod_base = OTHER; note = 2' fluoro-modified nucleoside - 2' fluoroadenosine
  modified_base 15: mod_base = OTHER; note = 2' O-methyl modified nucleoside - 2' O-methylguanosine
  modified_base 16: mod_base = OTHER; note = 2' fluoro-modified nucleoside - 2' fluoroadenosine
  modified_base 17: mod_base = OTHER; note = 2' O-methyl modified nucleoside - 2' O-methylguanosine
  modified_base 18: mod_base = OTHER; note = 2' fluoro-modified nucleoside - 2' fluoroadenosine
  modified_base 19: mod_base = OTHER; note = 2' O-methyl modified nucleoside - 2' O-methyluridine phosphorothioate linkage
  modified_base 20: mod_base = OTHER; note = 2' O-methyl modified nucleoside - 2' O-methyluridine phosphorothioate linkage
  modified_base 21: mod_base = OTHER; note = 2' O-methyl modified nucleoside - 2' O-methyluridine
taccacgagtgtaagagattt

SEQ ID NO: 26035 - RNA, 21 nt, synthetic construct
  source 1..21: mol_type = other RNA; note = Description of Artificial Sequence: Synthetic oligonucleotide
  modified_base 1: mod_base = OTHER; note = 2' O-methyl modified nucleoside - 2' O-methyluridine phosphorothioate linkage
  modified_base 2: mod_base = OTHER; note = 2' fluoro-modified nucleoside - 2' fluorocytidine phosphorothioate linkage
  modified_base 3: mod_base = OTHER; note = 2' O-methyl modified nucleoside - 2' O-methyladenosine
  modified_base 4: mod_base = OTHER; note = 2' fluoro-modified nucleoside - 2' fluorocytidine
  modified_base 5: mod_base = OTHER; note = 2' O-methyl modified nucleoside - 2' O-methylcytidine
  modified_base 6: mod_base = OTHER; note = 2' fluoro-modified nucleoside - 2' fluoroadenosine
  modified_base 7: mod_base = OTHER; note = 2' O-methyl modified nucleoside - 2' O-methylcytidine
  modified_base 8: mod_base = OTHER; note = 2' fluoro-modified nucleoside - 2' fluoroguanosine
  modified_base 9: mod_base = OTHER; note = 2' O-methyl modified nucleoside - 2' O-methyladenosine
  modified_base 10: mod_base = OTHER; note = 2' fluoro-modified nucleoside - 2' fluoroguanosine
  modified_base 11: mod_base = OTHER; note = 2' O-methyl modified nucleoside - 2' O-methyluridine
  modified_base 12: mod_base = OTHER; note = 2' O-methyl modified nucleoside - 2' O-methylguanosine
  modified_base 13: mod_base = OTHER; note = 2' O-methyl modified nucleoside - 2' O-methyluridine
  modified_base 14: mod_base = OTHER; note = 2' fluoro-modified nucleoside - 2' fluoroadenosine
  modified_base 15: mod_base = OTHER; note = 2' O-methyl modified nucleoside - 2' O-methyladenosine
  modified_base 16: mod_base = OTHER; note = 2' fluoro-modified nucleoside - 2' fluoroguanosine
  modified_base 17: mod_base = OTHER; note = 2' O-methyl modified nucleoside - 2' O-methyladenosine
  modified_base 18: mod_base = OTHER; note = 2' fluoro-modified nucleoside - 2' fluoroguanosine
  modified_base 19: mod_base = OTHER; note = 2' O-methyl modified nucleoside - 2' O-methyladenosine phosphorothioate linkage
  modified_base 20: mod_base = OTHER; note = 2' O-methyl modified nucleoside - 2' O-methyluridine phosphorothioate linkage
  modified_base 21: mod_base = OTHER; note = 2' O-methyl modified nucleoside - 2' O-methyluridine
tcaccacgagtgtaagagatt

SEQ ID NO: 26036 - RNA, 21 nt, synthetic construct
  source 1..21: mol_type = other RNA; note = Description of Artificial Sequence: Synthetic oligonucleotide
  modified_base 1: mod_base = OTHER; note = 2' O-methyl modified nucleoside - 2' O-methyluridine phosphorothioate linkage
  modified_base 2: mod_base = OTHER; note = 2' fluoro-modified nucleoside - 2' fluorocytidine phosphorothioate linkage
  modified_base 3: mod_base = OTHER; note = 2' O-methyl modified nucleoside - 2' O-methylcytidine
  modified_base 4: mod_base = OTHER; note = 2' fluoro-modified nucleoside - 2' fluoroadenosine
  modified_base 5: mod_base = OTHER; note = 2' O-methyl modified nucleoside - 2' O-methylcytidine
  modified_base 6: mod_base = OTHER; note = 2' fluoro-modified nucleoside - 2' fluorocytidine
  modified_base 7: mod_base = OTHER; note = 2' O-methyl modified nucleoside - 2' O-methyladenosine
  modified_base 8: mod_base = OTHER; note = 2' fluoro-modified nucleoside - 2' fluorocytidine
  modified_base 9: mod_base = OTHER; note = 2' O-methyl modified nucleoside - 2' O-methylguanosine
  modified_base 10: mod_base = OTHER; note = 2' fluoro-modified nucleoside - 2' fluoroadenosine
  modified_base 11: mod_base = OTHER; note = 2' O-methyl modified nucleoside - 2' O-methylguanosine
  modified_base 12: mod_base = OTHER; note = 2' O-methyl modified nucleoside - 2' O-methyluridine
  modified_base 13: mod_base = OTHER; note = 2' O-methyl modified nucleoside - 2' O-methylguanosine
  modified_base 14: mod_base = OTHER; note = 2' fluoro-modified nucleoside - 2' fluorouridine
  modified_base 15: mod_base = OTHER; note = 2' O-methyl modified nucleoside - 2' O-methyladenosine
  modified_base 16: mod_base = OTHER; note = 2' fluoro-modified nucleoside - 2' fluoroadenosine
  modified_base 17: mod_base = OTHER; note = 2' O-methyl modified nucleoside - 2' O-methylguanosine
  modified_base 18: mod_base = OTHER; note = 2' fluoro-modified nucleoside - 2' fluoroadenosine
  modified_base 19: mod_base = OTHER; note = 2' O-methyl modified nucleoside - 2' O-methylguanosine phosphorothioate linkage
  modified_base 20: mod_base = OTHER; note = 2' O-methyl modified nucleoside - 2' O-methyluridine phosphorothioate linkage
  modified_base 21: mod_base = OTHER; note = 2' O-methyl modified nucleoside - 2' O-methyluridine
tccaccacgagtgtaagagtt

SEQ ID NO: 26037 - RNA, 21 nt, synthetic construct
  source 1..21: mol_type = other RNA; note = Description of Artificial Sequence: Synthetic oligonucleotide
  modified_base 1: mod_base = OTHER; note = 2' O-methyl modified nucleoside - 2' O-methyluridine phosphorothioate linkage
  modified_base 2: mod_base = OTHER; note = 2' fluoro-modified nucleoside - 2' fluorocytidine phosphorothioate linkage
  modified_base 3: mod_base = OTHER; note = 2' O-methyl modified nucleoside - 2' O-methyluridine
  modified_base 4: mod_base = OTHER; note = 2' fluoro-modified nucleoside - 2' fluorouridine
  modified_base 5: mod_base = OTHER; note = 2' O-methyl modified nucleoside - 2' O-methylcytidine
  modified_base 6: mod_base = OTHER; note = 2' fluoro-modified nucleoside - 2' fluorocytidine
  modified_base 7: mod_base = OTHER; note = 2' O-methyl modified nucleoside - 2' O-methylcytidine
  modified_base 8: mod_base = OTHER; note = 2' fluoro-modified nucleoside - 2' fluoroadenosine
  modified_base 9: mod_base = OTHER; note = 2' O-methyl modified nucleoside - 2' O-methylcytidine
  modified_base 10: mod_base = OTHER; note = 2' fluoro-modified nucleoside - 2' fluorocytidine
  modified_base 11: mod_base = OTHER; note = 2' O-methyl modified nucleoside - 2' O-methyladenosine
  modified_base 12: mod_base = OTHER; note = 2' O-methyl modified nucleoside - 2' O-methylcytidine
  modified_base 13: mod_base = OTHER; note = 2' O-methyl modified nucleoside - 2' O-methylguanosine
  modified_base 14: mod_base = OTHER; note = 2' fluoro-modified nucleoside - 2' fluoroadenosine
  modified_base 15: mod_base = OTHER; note = 2' O-methyl modified nucleoside - 2' O-methylguanosine
  modified_base 16: mod_base = OTHER; note = 2' fluoro-modified nucleoside - 2' fluorouridine
  modified_base 17: mod_base = OTHER; note = 2' O-methyl modified nucleoside - 2' O-methylguanosine
  modified_base 18: mod_base = OTHER; note = 2' fluoro-modified nucleoside - 2' fluorouridine
  modified_base 19: mod_base = OTHER; note = 2' O-methyl modified nucleoside - 2' O-methyladenosine phosphorothioate linkage
  modified_base 20: mod_base = OTHER; note = 2' O-methyl modified nucleoside - 2' O-methyluridine phosphorothioate linkage
  modified_base 21: mod_base = OTHER; note = 2' O-methyl modified nucleoside - 2' O-methyluridine
tcttcccaccacgagtgtatt

SEQ ID NO: 26038 - RNA, 21 nt, synthetic construct
  source 1..21: mol_type = other RNA; note = Description of Artificial Sequence: Synthetic oligonucleotide
  modified_base 1: mod_base = OTHER; note = 2' O-methyl modified nucleoside - 2' O-methyluridine phosphorothioate linkage
  modified_base 2: mod_base = OTHER; note = 2' fluoro-modified nucleoside - 2' fluorouridine phosphorothioate linkage
  modified_base 3: mod_base = OTHER; note = 2' O-methyl modified nucleoside - 2' O-methylcytidine
  modified_base 4: mod_base = OTHER; note = 2' fluoro-modified nucleoside - 2' fluorouridine
  modified_base 5: mod_base = OTHER; note = 2' O-methyl modified nucleoside - 2' O-methyluridine
  modified_base 6: mod_base = OTHER; note = 2' fluoro-modified nucleoside - 2' fluorocytidine
  modified_base 7: mod_base = OTHER; note = 2' O-methyl modified nucleoside - 2' O-methylcytidine
  modified_base 8: mod_base = OTHER; note = 2' fluoro-modified nucleoside - 2' fluorocytidine
  modified_base 9: mod_base = OTHER; note = 2' O-methyl modified nucleoside - 2' O-methyladenosine
  modified_base 10: mod_base = OTHER; note = 2' fluoro-modified nucleoside - 2' fluorocytidine
  modified_base 11: mod_base = OTHER; note = 2' O-methyl modified nucleoside - 2' O-methylcytidine
  modified_base 12: mod_base = OTHER; note = 2' O-methyl modified nucleoside - 2' O-methyladenosine
  modified_base 13: mod_base = OTHER; note = 2' O-methyl modified nucleoside - 2' O-methylcytidine
  modified_base 14: mod_base = OTHER; note = 2' fluoro-modified nucleoside - 2' fluoroguanosine
  modified_base 15: mod_base = OTHER; note = 2' O-methyl modified nucleoside - 2' O-methyladenosine
  modified_base 16: mod_base = OTHER; note = 2' fluoro-modified nucleoside - 2' fluoroguanosine
  modified_base 17: mod_base = OTHER; note = 2' O-methyl modified nucleoside - 2' O-methyluridine
  modified_base 18: mod_base = OTHER; note = 2' fluoro-modified nucleoside - 2' fluoroguanosine
  modified_base 19: mod_base = OTHER; note = 2' O-methyl modified nucleoside - 2' O-methyluridine phosphorothioate linkage
  modified_base 20: mod_base = OTHER; note = 2' O-methyl modified nucleoside - 2' O-methyluridine phosphorothioate linkage
  modified_base 21: mod_base = OTHER; note = 2' O-methyl modified nucleoside - 2' O-methyluridine
ttcttcccaccacgagtgttt

SEQ ID NO: 26039 - RNA, 21 nt, synthetic construct
  source 1..21: mol_type = other RNA; note = Description of Artificial Sequence: Synthetic oligonucleotide
  modified_base 1: mod_base = OTHER; note = 2' O-methyl modified nucleoside - 2' O-methyluridine phosphorothioate linkage
  modified_base 2: mod_base = OTHER; note = 2' fluoro-modified nucleoside - 2' fluoroadenosine phosphorothioate linkage
  modified_base 3: mod_base = OTHER; note = 2' O-methyl modified nucleoside - 2' O-methylcytidine
  modified_base 4: mod_base = OTHER; note = 2' fluoro-modified nucleoside - 2' fluorouridine
  modified_base 5: mod_base = OTHER; note = 2' O-methyl modified nucleoside - 2' O-methylcytidine
  modified_base 6: mod_base = OTHER; note = 2' fluoro-modified nucleoside - 2' fluorouridine
  modified_base 7: mod_base = OTHER; note = 2' O-methyl modified nucleoside - 2' O-methyluridine
  modified_base 8: mod_base = OTHER; note = 2' fluoro-modified nucleoside - 2' fluorocytidine
  modified_base 9: mod_base = OTHER; note = 2' O-methyl modified nucleoside - 2' O-methylcytidine
  modified_base 10: mod_base = OTHER; note = 2' fluoro-modified nucleoside - 2' fluorocytidine
  modified_base 11: mod_base = OTHER; note = 2' O-methyl modified nucleoside - 2' O-methyladenosine
  modified_base 12: mod_base = OTHER; note = 2' O-methyl modified nucleoside - 2' O-methylcytidine
  modified_base 13: mod_base = OTHER; note = 2' O-methyl modified nucleoside - 2' O-methylcytidine
  modified_base 14: mod_base = OTHER; note = 2' fluoro-modified nucleoside - 2' fluoroadenosine
  modified_base 15: mod_base = OTHER; note = 2' O-methyl modified nucleoside - 2' O-methylcytidine
  modified_base 16: mod_base = OTHER; note = 2' fluoro-modified nucleoside - 2' fluoroguanosine
  modified_base 17: mod_base = OTHER; note = 2' O-methyl modified nucleoside - 2' O-methyladenosine
  modified_base 18: mod_base = OTHER; note = 2' fluoro-modified nucleoside - 2' fluoroguanosine
  modified_base 19: mod_base = OTHER; note = 2' O-methyl modified nucleoside - 2' O-methyluridine phosphorothioate linkage
  modified_base 20: mod_base = OTHER; note = 2' O-methyl modified nucleoside - 2' O-methyluridine phosphorothioate linkage
  modified_base 21: mod_base = OTHER; note = 2' O-methyl modified nucleoside - 2' O-methyluridine
tactcttcccaccacgagttt

SEQ ID NO: 26040 - RNA, 21 nt, synthetic construct
  source 1..21: mol_type = other RNA; note = Description of Artificial Sequence: Synthetic oligonucleotide
  modified_base 1: mod_base = OTHER; note = 2' O-methyl modified nucleoside - 2' O-methyluridine phosphorothioate linkage
  modified_base 2: mod_base = OTHER; note = 2' fluoro-modified nucleoside - 2' fluorouridine phosphorothioate linkage
  modified_base 3: mod_base = OTHER; note = 2' O-methyl modified nucleoside - 2' O-methyladenosine
  modified_base 4: mod_base = OTHER; note = 2' fluoro-modified nucleoside - 2' fluoroadenosine
  modified_base 5: mod_base = OTHER; note = 2' O-methyl modified nucleoside - 2' O-methyladenosine
  modified_base 6: mod_base = OTHER; note = 2' fluoro-modified nucleoside - 2' fluorocytidine
  modified_base 7: mod_base = OTHER; note = 2' O-methyl modified nucleoside - 2' O-methyluridine
  modified_base 8: mod_base = OTHER; note = 2' fluoro-modified nucleoside - 2' fluorocytidine
  modified_base 9: mod_base = OTHER; note = 2' O-methyl modified nucleoside - 2' O-methyluridine
  modified_base 10: mod_base = OTHER; note = 2' fluoro-modified nucleoside - 2' fluorouridine
  modified_base 11: mod_base = OTHER; note = 2' O-methyl modified nucleoside - 2' O-methylcytidine
  modified_base 12: mod_base = OTHER; note = 2' O-methyl modified nucleoside - 2' O-methylcytidine
  modified_base 13: mod_base = OTHER; note = 2' O-methyl modified nucleoside - 2' O-methylcytidine
  modified_base 14: mod_base = OTHER; note = 2' fluoro-modified nucleoside - 2' fluoroadenosine
  modified_base 15: mod_base = OTHER; note = 2' O-methyl modified nucleoside - 2' O-methylcytidine
  modified_base 16: mod_base = OTHER; note = 2' fluoro-modified nucleoside - 2' fluorocytidine
  modified_base 17: mod_base = OTHER; note = 2' O-methyl modified nucleoside - 2' O-methyladenosine
  modified_base 18: mod_base = OTHER; note = 2' fluoro-modified nucleoside - 2' fluorocytidine
  modified_base 19: mod_base = OTHER; note = 2' O-methyl modified nucleoside - 2' O-methylguanosine phosphorothioate linkage
  modified_base 20: mod_base = OTHER; note = 2' O-methyl modified nucleoside - 2' O-methyluridine phosphorothioate linkage
  modified_base 21: mod_base = OTHER; note = 2' O-methyl modified nucleoside - 2' O-methyluridine
ttaaactcttcccaccacgtt

SEQ ID NO: 26041 - RNA, 21 nt, synthetic construct
  source 1..21: mol_type = other RNA; note = Description of Artificial Sequence: Synthetic oligonucleotide
  modified_base 1: mod_base = OTHER; note = 2' O-methyl modified nucleoside - 2' O-methyluridine phosphorothioate linkage
  modified_base 2: mod_base = OTHER; note = 2' fluoro-modified nucleoside - 2' fluoroadenosine phosphorothioate linkage
  modified_base 3: mod_base = OTHER; note = 2' O-methyl modified nucleoside - 2' O-methyluridine
  modified_base 4: mod_base = OTHER; note = 2' fluoro-modified nucleoside - 2' fluorouridine
  modified_base 5: mod_base = OTHER; note = 2' O-methyl modified nucleoside - 2' O-methylcytidine
  modified_base 6: mod_base = OTHER; note = 2' fluoro-modified nucleoside - 2' fluorocytidine
  modified_base 7: mod_base = OTHER; note = 2' O-methyl modified nucleoside - 2' O-methyladenosine
  modified_base 8: mod_base = OTHER; note = 2' fluoro-modified nucleoside - 2' fluorocytidine
  modified_base 9: mod_base = OTHER; note = 2' O-methyl modified nucleoside - 2' O-methylcytidine
  modified_base 10: mod_base = OTHER; note = 2' fluoro-modified nucleoside - 2' fluorocytidine
  modified_base 11: mod_base = OTHER; note = 2' O-methyl modified nucleoside - 2' O-methylcytidine
  modified_base 12: mod_base = OTHER; note = 2' O-methyl modified nucleoside - 2' O-methyladenosine
  modified_base 13: mod_base = OTHER; note = 2' O-methyl modified nucleoside - 2' O-methylguanosine
  modified_base 14: mod_base = OTHER; note = 2' fluoro-modified nucleoside - 2' fluorouridine
  modified_base 15: mod_base = OTHER; note = 2' O-methyl modified nucleoside - 2' O-methyluridine
  modified_base 16: mod_base = OTHER; note = 2' fluoro-modified nucleoside - 2' fluorouridine
  modified_base 17: mod_base = OTHER; note = 2' O-methyl modified nucleoside - 2' O-methylcytidine
  modified_base 18: mod_base = OTHER; note = 2' fluoro-modified nucleoside - 2' fluoroadenosine
  modified_base 19: mod_base = OTHER; note = 2' O-methyl modified nucleoside - 2' O-methylcytidine phosphorothioate linkage
  modified_base 20: mod_base = OTHER; note = 2' O-methyl modified nucleoside - 2' O-methyluridine phosphorothioate linkage
  modified_base 21: mod_base = OTHER; note = 2' O-methyl modified nucleoside - 2' O-methyluridine
tattccaccccagtttcactt

SEQ ID NO: 26042 - RNA, 21 nt, synthetic construct
  source 1..21: mol_type = other RNA; note = Description of Artificial Sequence: Synthetic oligonucleotide
  modified_base 1: mod_base = OTHER; note = 2' O-methyl modified nucleoside - 2' O-methyluridine phosphorothioate linkage
  modified_base 2: mod_base = OTHER; note = 2' fluoro-modified nucleoside - 2' fluorocytidine phosphorothioate linkage
  modified_base 3: mod_base = OTHER; note = 2' O-methyl modified nucleoside - 2' O-methylguanosine
  modified_base 4: mod_base = OTHER; note = 2' fluoro-modified nucleoside - 2' fluorouridine
  modified_base 5: mod_base = OTHER; note = 2' O-methyl modified nucleoside - 2' O-methylguanosine
  modified_base 6: mod_base = OTHER; note = 2' fluoro-modified nucleoside - 2' fluoroguanosine
  modified_base 7: mod_base = OTHER; note = 2' O-methyl modified nucleoside - 2' O-methyladenosine
  modified_base 8: mod_base = OTHER; note = 2' fluoro-modified nucleoside - 2' fluorocytidine
  modified_base 9: mod_base = OTHER; note = 2' O-methyl modified nucleoside - 2' O-methyladenosine
  modified_base 10: mod_base = OTHER; note = 2' fluoro-modified nucleoside - 2' fluorocytidine
  modified_base 11: mod_base = OTHER; note = 2' O-methyl modified nucleoside - 2' O-methylcytidine
  modified_base 12: mod_base = OTHER; note = 2' O-methyl modified nucleoside - 2' O-methylcytidine
  modified_base 13: mod_base = OTHER; note = 2' O-methyl modified nucleoside - 2' O-methyladenosine
  modified_base 14: mod_base = OTHER; note = 2' fluoro-modified nucleoside - 2' fluoroadenosine
  modified_base 15: mod_base = OTHER; note = 2' O-methyl modified nucleoside - 2' O-methyluridine
  modified_base 16: mod_base = OTHER; note = 2' fluoro-modified nucleoside - 2' fluorouridine
  modified_base 17: mod_base = OTHER; note = 2' O-methyl modified nucleoside - 2' O-methylcytidine
  modified_base 18: mod_base = OTHER; note = 2' fluoro-modified nucleoside - 2' fluorocytidine
  modified_base 19: mod_base = OTHER; note = 2' O-methyl modified nucleoside - 2' O-methyladenosine phosphorothioate linkage
  modified_base 20: mod_base = OTHER; note = 2' O-methyl modified nucleoside - 2' O-methyluridine phosphorothioate linkage
  modified_base 21: mod_base = OTHER; note = 2' O-methyl modified nucleoside - 2' O-methyluridine
tcgtggacacccaattccatt

SEQ ID NO: 26043 - RNA, 21 nt, synthetic construct
  source 1..21: mol_type = other RNA; note = Description of Artificial Sequence: Synthetic oligonucleotide
  modified_base 1: mod_base = OTHER; note = 2' O-methyl modified nucleoside - 2' O-methyluridine phosphorothioate linkage
  modified_base 2: mod_base = OTHER; note = 2' fluoro-modified nucleoside - 2' fluorouridine phosphorothioate linkage
  modified_base 3: mod_base = OTHER; note = 2' O-methyl modified nucleoside - 2' O-methyladenosine
  modified_base 4: mod_base = OTHER; note = 2' fluoro-modified nucleoside - 2' fluorocytidine
  modified_base 5: mod_base = OTHER; note = 2' O-methyl modified nucleoside - 2' O-methylguanosine
  modified_base 6: mod_base = OTHER; note = 2' fluoro-modified nucleoside - 2' fluorouridine
  modified_base 7: mod_base = OTHER; note = 2' O-methyl modified nucleoside - 2' O-methylguanosine
  modified_base 8: mod_base = OTHER; note = 2' fluoro-modified nucleoside - 2' fluoroguanosine
  modified_base 9: mod_base = OTHER; note = 2' O-methyl modified nucleoside - 2' O-methyladenosine
  modified_base 10: mod_base = OTHER; note = 2' fluoro-modified nucleoside - 2' fluorocytidine
  modified_base 11: mod_base = OTHER; note = 2' O-methyl modified nucleoside - 2' O-methyladenosine
  modified_base 12: mod_base = OTHER; note = 2' O-methyl modified nucleoside - 2' O-methylcytidine
  modified_base 13: mod_base = OTHER; note = 2' O-methyl modified nucleoside - 2' O-methylcytidine
  modified_base 14: mod_base = OTHER; note = 2' fluoro-modified nucleoside - 2' fluorocytidine
  modified_base 15: mod_base = OTHER; note = 2' O-methyl modified nucleoside - 2' O-methyladenosine
  modified_base 16: mod_base = OTHER; note = 2' fluoro-modified nucleoside - 2' fluoroadenosine
  modified_base 17: mod_base = OTHER; note = 2' O-methyl modified nucleoside - 2' O-methyluridine
  modified_base 18: mod_base = OTHER; note = 2' fluoro-modified nucleoside - 2' fluorouridine
  modified_base 19: mod_base = OTHER; note = 2' O-methyl modified nucleoside - 2' O-methylcytidine phosphorothioate linkage
  modified_base 20: mod_base = OTHER; note = 2' O-methyl modified nucleoside - 2' O-methyluridine phosphorothioate linkage
  modified_base 21: mod_base = OTHER; note = 2' O-methyl modified nucleoside - 2' O-methyluridine
ttacgtggacacccaattctt

SEQ ID NO: 26044 - RNA, 21 nt, synthetic construct
  source 1..21: mol_type = other RNA; note = Description of Artificial Sequence: Synthetic oligonucleotide
  modified_base 1: mod_base = OTHER; note = 2' O-methyl modified nucleoside - 2' O-methyluridine phosphorothioate linkage
  modified_base 2: mod_base = OTHER; note = 2' fluoro-modified nucleoside - 2' fluoroadenosine phosphorothioate linkage
  modified_base 3: mod_base = OTHER; note = 2' O-methyl modified nucleoside - 2' O-methyluridine
  modified_base 4: mod_base = OTHER; note = 2' fluoro-modified nucleoside - 2' fluoroadenosine
  modified_base 5: mod_base = OTHER; note = 2' O-methyl modified nucleoside - 2' O-methylcytidine
  modified_base 6: mod_base = OTHER; note = 2' fluoro-modified nucleoside - 2' fluoroguanosine
  modified_base 7: mod_base = OTHER; note = 2' O-methyl modified nucleoside - 2' O-methyluridine
  modified_base 8: mod_base = OTHER; note = 2' fluoro-modified nucleoside - 2' fluoroguanosine
  modified_base 9: mod_base = OTHER; note = 2' O-methyl modified nucleoside - 2' O-methylguanosine
  modified_base 10: mod_base = OTHER; note = 2' fluoro-modified nucleoside - 2' fluoroadenosine
  modified_base 11: mod_base = OTHER; note = 2' O-methyl modified nucleoside - 2' O-methylcytidine
  modified_base 12: mod_base = OTHER; note = 2' O-methyl modified nucleoside - 2' O-methyladenosine
  modified_base 13: mod_base = OTHER; note = 2' O-methyl modified nucleoside - 2' O-methylcytidine
  modified_base 14: mod_base = OTHER; note = 2' fluoro-modified nucleoside - 2' fluorocytidine
  modified_base 15: mod_base = OTHER; note = 2' O-methyl modified nucleoside - 2' O-methylcytidine
  modified_base 16: mod_base = OTHER; note = 2' fluoro-modified nucleoside - 2' fluoroadenosine
  modified_base 17: mod_base = OTHER; note = 2' O-methyl modified nucleoside - 2' O-methyladenosine
  modified_base 18: mod_base = OTHER; note = 2' fluoro-modified nucleoside - 2' fluorouridine
  modified_base 19: mod_base = OTHER; note = 2' O-methyl modified nucleoside - 2' O-methyluridine phosphorothioate linkage
  modified_base 20: mod_base = OTHER; note = 2' O-methyl modified nucleoside - 2' O-methyluridine phosphorothioate linkage
  modified_base 21: mod_base = OTHER; note = 2' O-methyl modified nucleoside - 2' O-methyluridine
tatacgtggacacccaatttt

SEQ ID NO: 26045 - RNA, 21 nt, synthetic construct
  source 1..21: mol_type = other RNA; note = Description of Artificial Sequence: Synthetic oligonucleotide
  modified_base 1: mod_base = OTHER; note = 2' O-methyl modified nucleoside - 2' O-methyluridine phosphorothioate linkage
  modified_base 2: mod_base = OTHER; note = 2' fluoro-modified nucleoside - 2' fluorocytidine phosphorothioate linkage
  modified_base 3: mod_base = OTHER; note = 2' O-methyl modified nucleoside - 2' O-methyladenosine
  modified_base 4: mod_base = OTHER; note = 2' fluoro-modified nucleoside - 2' fluorouridine
  modified_base 5: mod_base = OTHER; note = 2' O-methyl modified nucleoside - 2' O-methyladenosine
  modified_base 6: mod_base = OTHER; note = 2' fluoro-modified nucleoside - 2' fluorocytidine
  modified_base 7: mod_base = OTHER; note = 2' O-methyl modified nucleoside - 2' O-methylguanosine
  modified_base 8: mod_base = OTHER; note = 2' fluoro-modified nucleoside - 2' fluorouridine
  modified_base 9: mod_base = OTHER; note = 2' O-methyl modified nucleoside - 2' O-methylguanosine
  modified_base 10: mod_base = OTHER; note = 2' fluoro-modified nucleoside - 2' fluoroguanosine
  modified_base 11: mod_base = OTHER; note = 2' O-methyl modified nucleoside - 2' O-methyladenosine
  modified_base 12: mod_base = OTHER; note = 2' O-methyl modified nucleoside - 2' O-methylcytidine
  modified_base 13: mod_base = OTHER; note = 2' O-methyl modified nucleoside - 2' O-methyladenosine
  modified_base 14: mod_base = OTHER; note = 2' fluoro-modified nucleoside - 2' fluorocytidine
  modified_base 15: mod_base = OTHER; note = 2' O-methyl modified nucleoside - 2' O-methylcytidine
  modified_base 16: mod_base = OTHER; note = 2' fluoro-modified nucleoside - 2' fluorocytidine
  modified_base 17: mod_base = OTHER; note = 2' O-methyl modified nucleoside - 2' O-methyladenosine
  modified_base 18: mod_base = OTHER; note = 2' fluoro-modified nucleoside - 2' fluoroadenosine
  modified_base 19: mod_base = OTHER; note = 2' O-methyl modified nucleoside - 2' O-methyluridine phosphorothioate linkage
  modified_base 20: mod_base = OTHER; note = 2' O-methyl modified nucleoside - 2' O-methyluridine phosphorothioate linkage
  modified_base 21: mod_base = OTHER; note = 2' O-methyl modified nucleoside - 2' O-methyluridine
tcatacgtggacacccaattt

SEQ ID NO: 26046 - RNA, 21 nt, synthetic construct
  source 1..21: mol_type = other RNA; note = Description of Artificial Sequence: Synthetic oligonucleotide
  modified_base 1: mod_base = OTHER; note = 2' O-methyl modified nucleoside - 2' O-methyluridine phosphorothioate linkage
  modified_base 2: mod_base = OTHER; note = 2' fluoro-modified nucleoside - 2' fluoroguanosine phosphorothioate linkage
  modified_base 3: mod_base = OTHER; note = 2' O-methyl modified nucleoside - 2' O-methyladenosine
  modified_base 4: mod_base = OTHER; note = 2' fluoro-modified nucleoside - 2' fluoroadenosine
  modified_base 5: mod_base = OTHER; note = 2' O-methyl modified nucleoside - 2' O-methylcytidine
  modified_base 6: mod_base = OTHER; note = 2' fluoro-modified nucleoside - 2' fluoroadenosine
  modified_base 7: mod_base = OTHER; note = 2' O-methyl modified nucleoside - 2' O-methyluridine
  modified_base 8: mod_base = OTHER; note = 2' fluoro-modified nucleoside - 2' fluoroadenosine
  modified_base 9: mod_base = OTHER; note = 2' O-methyl modified nucleoside - 2' O-methylcytidine
  modified_base 10: mod_base = OTHER; note = 2' fluoro-modified nucleoside - 2' fluoroguanosine
  modified_base 11: mod_base = OTHER; note = 2' O-methyl modified nucleoside - 2' O-methyluridine
  modified_base 12: mod_base = OTHER; note = 2' O-methyl modified nucleoside - 2' O-methylguanosine
  modified_base 13: mod_base = OTHER; note = 2' O-methyl modified nucleoside - 2' O-methylguanosine
  modified_base 14: mod_base = OTHER; note = 2' fluoro-modified nucleoside - 2' fluoroadenosine
  modified_base 15: mod_base = OTHER; note = 2' O-methyl modified nucleoside - 2' O-methylcytidine
  modified_base 16: mod_base = OTHER; note = 2' fluoro-modified nucleoside - 2' fluoroadenosine
  modified_base 17: mod_base = OTHER; note = 2' O-methyl modified nucleoside - 2' O-methylcytidine
  modified_base 18: mod_base = OTHER; note = 2' fluoro-modified nucleoside - 2' fluorocytidine
  modified_base 19: mod_base = OTHER; note = 2' O-methyl modified nucleoside - 2' O-methylcytidine phosphorothioate linkage
  modified_base 20: mod_base = OTHER; note = 2' O-methyl modified nucleoside - 2' O-methyluridine phosphorothioate linkage
  modified_base 21: mod_base = OTHER; note = 2' O-methyl modified nucleoside - 2' O-methyluridine
tgaacatacgtggacaccctt

SEQ ID NO: 26047 - RNA, 21 nt, synthetic construct
  source 1..21: mol_type = other RNA; note = Description of Artificial Sequence: Synthetic oligonucleotide
  modified_base 1: mod_base = OTHER; note = 2' O-methyl modified nucleoside - 2' O-methyluridine phosphorothioate linkage
  modified_base 2: mod_base = OTHER; note = 2' fluoro-modified nucleoside - 2' fluoroguanosine phosphorothioate linkage
  modified_base 3: mod_base = OTHER; note = 2' O-methyl modified nucleoside - 2' O-methylguanosine
  modified_base 4: mod_base = OTHER; note = 2' fluoro-modified nucleoside - 2' fluoroadenosine
  modified_base 5: mod_base = OTHER; note = 2' O-methyl modified nucleoside - 2' O-methyladenosine
  modified_base 6: mod_base = OTHER; note = 2' fluoro-modified nucleoside - 2' fluorocytidine
  modified_base 7: mod_base = OTHER; note = 2' O-methyl modified nucleoside - 2' O-methyladenosine
  modified_base 8: mod_base = OTHER; note = 2' fluoro-modified nucleoside - 2' fluorouridine
  modified_base 9: mod_base = OTHER; note = 2' O-methyl modified nucleoside - 2' O-methyladenosine
  modified_base 10: mod_base = OTHER; note = 2' fluoro-modified nucleoside - 2' fluorocytidine
  modified_base 11: mod_base = OTHER; note = 2' O-methyl modified nucleoside - 2' O-methylguanosine
  modified_base 12: mod_base = OTHER; note = 2' O-methyl modified nucleoside - 2' O-methyluridine
  modified_base 13: mod_base = OTHER; note = 2' O-methyl modified nucleoside - 2' O-methylguanosine
  modified_base 14: mod_base = OTHER; note = 2' fluoro-modified nucleoside - 2' fluoroguanosine
  modified_base 15: mod_base = OTHER; note = 2' O-methyl modified nucleoside - 2' O-methyladenosine
  modified_base 16: mod_base = OTHER; note = 2' fluoro-modified nucleoside - 2' fluorocytidine
  modified_base 17: mod_base = OTHER; note = 2' O-methyl modified nucleoside - 2' O-methyladenosine
  modified_base 18: mod_base = OTHER; note = 2' fluoro-modified nucleoside - 2' fluorocytidine
  modified_base 19: mod_base = OTHER; note = 2' O-methyl modified nucleoside - 2' O-methylcytidine phosphorothioate linkage
  modified_base 20: mod_base = OTHER; note = 2' O-methyl modified nucleoside - 2' O-methyluridine phosphorothioate linkage
  modified_base 21: mod_base = OTHER; note = 2' O-methyl modified nucleoside - 2' O-methyluridine
tggaacatacgtggacacctt

SEQ ID NO: 26048 - RNA, 21 nt, synthetic construct
  source 1..21: mol_type = other RNA; note = Description of Artificial Sequence: Synthetic oligonucleotide
  modified_base 1: mod_base = OTHER; note = 2' O-methyl modified nucleoside - 2' O-methyluridine phosphorothioate linkage
  modified_base 2: mod_base = OTHER; note = 2' fluoro-modified nucleoside - 2' fluoroadenosine phosphorothioate linkage
  modified_base 3: mod_base = OTHER; note = 2' O-methyl modified nucleoside - 2' O-methyladenosine
  modified_base 4: mod_base = OTHER; note = 2' fluoro-modified nucleoside - 2' fluoroadenosine
  modified_base 5: mod_base = OTHER; note = 2' O-methyl modified nucleoside - 2' O-methyladenosine
  modified_base 6: mod_base = OTHER; note = 2' fluoro-modified nucleoside - 2' fluoroguanosine
  modified_base 7: mod_base = OTHER; note = 2' O-methyl modified nucleoside - 2' O-methylguanosine
  modified_base 8: mod_base = OTHER; note = 2' fluoro-modified nucleoside - 2' fluoroguanosine
  modified_base 9: mod_base = OTHER; note = 2' O-methyl modified nucleoside - 2' O-methyladenosine
  modified_base 10: mod_base = OTHER; note = 2' fluoro-modified nucleoside - 2' fluoroadenosine
  modified_base 11: mod_base = OTHER; note = 2' O-methyl modified nucleoside - 2' O-methylcytidine
  modified_base 12: mod_base = OTHER; note = 2' O-methyl modified nucleoside - 2' O-methyladenosine
  modified_base 13: mod_base = OTHER; note = 2' O-methyl modified nucleoside - 2' O-methyluridine
  modified_base 14: mod_base = OTHER; note = 2' fluoro-modified nucleoside - 2' fluoroadenosine
  modified_base 15: mod_base = OTHER; note = 2' O-methyl modified nucleoside - 2' O-methylcytidine
  modified_base 16: mod_base = OTHER; note = 2' fluoro-modified nucleoside - 2' fluoroguanosine
  modified_base 17: mod_base = OTHER; note = 2' O-methyl modified nucleoside - 2' O-methyluridine
  modified_base 18: mod_base = OTHER; note = 2' fluoro-modified nucleoside - 2' fluoroguanosine
  modified_base 19: mod_base = OTHER; note = 2' O-methyl modified nucleoside - 2' O-methylguanosine phosphorothioate linkage
  modified_base 20: mod_base = OTHER; note = 2' O-methyl modified nucleoside - 2' O-methyluridine phosphorothioate linkage
  modified_base 21: mod_base = OTHER; note = 2' O-methyl modified nucleoside - 2' O-methyluridine
taaaagggaacatacgtggtt

SEQ ID NO: 26049 - RNA, 21 nt, synthetic construct
  source 1..21: mol_type = other RNA; note = Description of Artificial Sequence: Synthetic oligonucleotide
  modified_base 1: mod_base = OTHER; note = 2' O-methyl modified nucleoside - 2' O-methyluridine phosphorothioate linkage
  modified_base 2: mod_base = OTHER; note = 2' fluoro-modified nucleoside - 2' fluorocytidine phosphorothioate linkage
  modified_base 3: mod_base = OTHER; note = 2' O-methyl modified nucleoside - 2' O-methyladenosine
  modified_base 4: mod_base = OTHER; note = 2' fluoro-modified nucleoside - 2' fluoroadenosine
  modified_base 5: mod_base = OTHER; note = 2' O-methyl modified nucleoside - 2' O-methyladenosine
  modified_base 6: mod_base = OTHER; note = 2' fluoro-modified nucleoside - 2' fluoroadenosine
  modified_base 7: mod_base = OTHER; note = 2' O-methyl modified nucleoside - 2' O-methylguanosine
  modified_base 8: mod_base = OTHER; note = 2' fluoro-modified nucleoside - 2' fluoroguanosine
  modified_base 9: mod_base = OTHER; note = 2' O-methyl modified nucleoside - 2' O-methylguanosine
  modified_base 10: mod_base = OTHER; note = 2' fluoro-modified nucleoside - 2' fluoroadenosine
  modified_base 11: mod_base = OTHER; note = 2' O-methyl modified nucleoside - 2' O-methyladenosine
  modified_base 12: mod_base = OTHER; note = 2' O-methyl modified nucleoside - 2' O-methylcytidine
  modified_base 13: mod_base = OTHER; note = 2' O-methyl modified nucleoside - 2' O-methyladenosine
  modified_base 14: mod_base = OTHER; note = 2' fluoro-modified nucleoside - 2' fluorouridine
  modified_base 15: mod_base = OTHER; note = 2' O-methyl modified nucleoside - 2' O-methyladenosine
  modified_base 16: mod_base = OTHER; note = 2' fluoro-modified nucleoside - 2' fluorocytidine
  modified_base 17: mod_base = OTHER; note = 2' O-methyl modified nucleoside - 2' O-methylguanosine
  modified_base 18: mod_base = OTHER; note = 2' fluoro-modified nucleoside - 2' fluorouridine
  modified_base 19: mod_base = OTHER; note = 2' O-methyl modified nucleoside - 2' O-methylguanosine phosphorothioate linkage
  modified_base 20: mod_base = OTHER; note = 2' O-methyl modified nucleoside - 2' O-methyluridine phosphorothioate linkage
  modified_base 21: mod_base = OTHER; note = 2' O-methyl modified nucleoside - 2' O-methyluridine
tcaaaagggaacatacgtgtt

SEQ ID NO: 26050 - RNA, 21 nt, synthetic construct
  source 1..21: mol_type = other RNA; note = Description of Artificial Sequence: Synthetic oligonucleotide
  modified_base 1: mod_base = OTHER; note = 2' O-methyl modified nucleoside - 2' O-methyluridine phosphorothioate linkage
  modified_base 2: mod_base = OTHER; note = 2' fluoro-modified nucleoside - 2' fluoroadenosine phosphorothioate linkage
  modified_base 3: mod_base = OTHER; note = 2' O-methyl modified nucleoside - 2' O-methylguanosine
  modified_base 4: mod_base = OTHER; note = 2' fluoro-modified nucleoside - 2' fluoroguanosine
  modified_base 5: mod_base = OTHER; note = 2' O-methyl modified nucleoside - 2' O-methylcytidine
  modified_base 6: mod_base = OTHER; note = 2' fluoro-modified nucleoside - 2' fluoroadenosine
  modified_base 7: mod_base = OTHER; note = 2' O-methyl modified nucleoside - 2' O-methyladenosine
  modified_base 8: mod_base = OTHER; note = 2' fluoro-modified nucleoside - 2' fluoroadenosine
  modified_base 9: mod_base = OTHER; note = 2' O-methyl modified nucleoside - 2' O-methyladenosine
  modified_base 10: mod_base = OTHER; note = 2' fluoro-modified nucleoside - 2' fluoroguanosine
  modified_base 11: mod_base = OTHER; note = 2' O-methyl modified nucleoside - 2' O-methylguanosine
  modified_base 12: mod_base = OTHER; note = 2' O-methyl modified nucleoside - 2' O-methylguanosine
  modified_base 13: mod_base = OTHER; note = 2' O-methyl modified nucleoside - 2' O-methyladenosine
  modified_base 14: mod_base = OTHER; note = 2' fluoro-modified nucleoside - 2' fluoroadenosine
  modified_base 15: mod_base = OTHER; note = 2' O-methyl modified nucleoside - 2' O-methylcytidine
  modified_base 16: mod_base = OTHER; note = 2' fluoro-modified nucleoside - 2' fluoroadenosine
  modified_base 17: mod_base = OTHER; note = 2' O-methyl modified nucleoside - 2' O-methyluridine
  modified_base 18: mod_base = OTHER; note = 2' fluoro-modified nucleoside - 2' fluoroadenosine
  modified_base 19: mod_base = OTHER; note = 2' O-methyl modified nucleoside - 2' O-methylcytidine phosphorothioate linkage
  modified_base 20: mod_base = OTHER; note = 2' O-methyl modified nucleoside - 2' O-methyluridine phosphorothioate linkage
  modified_base 21: mod_base = OTHER; note = 2' O-methyl modified nucleoside - 2' O-methyluridine
taggcaaaagggaacatactt

SEQ ID NO: 26051 - RNA, 21 nt, synthetic construct
  source 1..21: mol_type = other RNA; note = Description of Artificial Sequence: Synthetic oligonucleotide
  modified_base 1: mod_base = OTHER; note = 2' O-methyl modified nucleoside - 2' O-methyluridine phosphorothioate linkage
  modified_base 2: mod_base = OTHER; note = 2' fluoro-modified nucleoside - 2' fluoroguanosine phosphorothioate linkage
  modified_base 3: mod_base = OTHER; note = 2' O-methyl modified nucleoside - 2' O-methyluridine
  modified_base 4: mod_base = OTHER; note = 2' fluoro-modified nucleoside - 2' fluoroadenosine
  modified_base 5: mod_base = OTHER; note = 2' O-methyl modified nucleoside - 2' O-methyladenosine
  modified_base 6: mod_base = OTHER; note = 2' fluoro-modified nucleoside - 2' fluoroguanosine
  modified_base 7: mod_base = OTHER; note = 2' O-methyl modified nucleoside - 2' O-methylguanosine
  modified_base 8: mod_base = OTHER; note = 2' fluoro-modified nucleoside - 2' fluorocytidine
  modified_base 9: mod_base = OTHER; note = 2' O-methyl modified nucleoside - 2' O-methyladenosine
  modified_base 10: mod_base = OTHER; note = 2' fluoro-modified nucleoside - 2' fluoroadenosine
  modified_base 11: mod_base = OTHER; note = 2' O-methyl modified nucleoside - 2' O-methyladenosine
  modified_base 12: mod_base = OTHER; note = 2' O-methyl modified nucleoside - 2' O-methyladenosine
  modified_base 13: mod_base = OTHER; note = 2' O-methyl modified nucleoside - 2' O-methylguanosine
  modified_base 14: mod_base = OTHER; note = 2' fluoro-modified nucleoside - 2' fluoroguanosine
  modified_base 15: mod_base = OTHER; note = 2' O-methyl modified nucleoside - 2' O-methylguanosine
  modified_base 16: mod_base = OTHER; note = 2' fluoro-modified nucleoside - 2' fluoroadenosine
  modified_base 17: mod_base = OTHER; note = 2' O-methyl modified nucleoside - 2' O-methyladenosine
  modified_base 18: mod_base = OTHER; note = 2' fluoro-modified nucleoside - 2' fluorocytidine
  modified_base 19: mod_base = OTHER; note = 2' O-methyl modified nucleoside - 2' O-methyladenosine phosphorothioate linkage
  modified_base 20: mod_base = OTHER; note = 2' O-methyl modified nucleoside - 2' O-methyluridine phosphorothioate linkage
  modified_base 21: mod_base = OTHER; note = 2' O-methyl modified nucleoside - 2' O-methyluridine
tgtaaggcaaaagggaacatt

SEQ ID NO: 26052 - RNA, 21 nt, synthetic construct
  source 1..21: mol_type = other RNA; note = Description of Artificial Sequence: Synthetic oligonucleotide
  modified_base 1: mod_base = OTHER; note = 2' O-methyl modified nucleoside - 2' O-methyluridine phosphorothioate linkage
  modified_base 2: mod_base = OTHER; note = 2' fluoro-modified nucleoside - 2' fluoroadenosine phosphorothioate linkage
  modified_base 3: mod_base = OTHER; note = 2' O-methyl modified nucleoside - 2' O-methyluridine
  modified_base 4: mod_base = OTHER; note = 2' fluoro-modified nucleoside - 2' fluoroadenosine
  modified_base 5: mod_base = OTHER; note = 2' O-methyl modified nucleoside - 2' O-methylguanosine
  modified_base 6: mod_base = OTHER; note = 2' fluoro-modified nucleoside - 2' fluorouridine
  modified_base 7: mod_base = OTHER; note = 2' O-methyl modified nucleoside - 2' O-methyladenosine
  modified_base 8: mod_base = OTHER; note = 2' fluoro-modified nucleoside - 2' fluoroadenosine
  modified_base 9: mod_base = OTHER; note = 2' O-methyl modified nucleoside - 2' O-methylguanosine
  modified_base 10: mod_base = OTHER; note = 2' fluoro-modified nucleoside - 2' fluoroguanosine
  modified_base 11: mod_base = OTHER; note = 2' O-methyl modified nucleoside - 2' O-methylcytidine
  modified_base 12: mod_base = OTHER; note = 2' O-methyl modified nucleoside - 2' O-methyladenosine
  modified_base 13: mod_base = OTHER; note = 2' O-methyl modified nucleoside - 2' O-methyladenosine
  modified_base 14: mod_base = OTHER; note = 2' fluoro-modified nucleoside - 2' fluoroadenosine
  modified_base 15: mod_base = OTHER; note = 2' O-methyl modified nucleoside - 2' O-methyladenosine
  modified_base 16: mod_base = OTHER; note = 2' fluoro-modified nucleoside - 2' fluoroguanosine
  modified_base 17: mod_base = OTHER; note = 2' O-methyl modified nucleoside - 2' O-methylguanosine
  modified_base 18: mod_base = OTHER; note = 2' fluoro-modified nucleoside - 2' fluoroguanosine
  modified_base 19: mod_base = OTHER; note = 2' O-methyl modified nucleoside - 2' O-methyladenosine phosphorothioate linkage
  modified_base 20: mod_base = OTHER; note = 2' O-methyl modified nucleoside - 2' O-methyluridine phosphorothioate linkage
  modified_base 21: mod_base = OTHER; note = 2' O-methyl modified nucleoside - 2' O-methyluridine
tatagtaaggcaaaagggatt

SEQ ID NO: 26053 - RNA, 21 nt, synthetic construct
  source 1..21: mol_type = other RNA; note = Description of Artificial Sequence: Synthetic oligonucleotide
  modified_base 1: mod_base = OTHER; note = 2' O-methyl modified nucleoside - 2' O-methyluridine phosphorothioate linkage
  modified_base 2: mod_base = OTHER; note = 2' fluoro-modified nucleoside - 2' fluoroguanosine phosphorothioate linkage
  modified_base 3: mod_base = OTHER; note = 2' O-methyl modified nucleoside - 2' O-methyladenosine
  modified_base 4: mod_base = OTHER; note = 2' fluoro-modified nucleoside - 2' fluoroadenosine
  modified_base 5: mod_base = OTHER; note = 2' O-methyl modified nucleoside - 2' O-methylcytidine
  modified_base 6: mod_base = OTHER; note = 2' fluoro-modified nucleoside - 2' fluoroadenosine
  modified_base 7: mod_base = OTHER; note = 2' O-methyl modified nucleoside - 2' O-methyluridine
  modified_base 8: mod_base = OTHER; note = 2' fluoro-modified nucleoside - 2' fluoroadenosine
  modified_base 9: mod_base = OTHER; note = 2' O-methyl modified nucleoside - 2' O-methyluridine
  modified_base 10: mod_base = OTHER; note = 2' fluoro-modified nucleoside - 2' fluoroadenosine
  modified_base 11: mod_base = OTHER; note = 2' O-methyl modified nucleoside - 2' O-methylguanosine
  modified_base 12: mod_base = OTHER; note = 2' O-methyl modified nucleoside - 2' O-methyluridine
  modified_base 13: mod_base = OTHER; note = 2' O-methyl modified nucleoside - 2' O-methyladenosine
  modified_base 14: mod_base = OTHER; note = 2' fluoro-modified nucleoside - 2' fluoroadenosine
  modified_base 15: mod_base = OTHER; note = 2' O-methyl modified nucleoside - 2' O-methylguanosine
  modified_base 16: mod_base = OTHER; note = 2' fluoro-modified nucleoside - 2' fluoroguanosine
  modified_base 17: mod_base = OTHER; note = 2' O-methyl modified nucleoside - 2' O-methylcytidine
  modified_base 18: mod_base = OTHER; note = 2' fluoro-modified nucleoside - 2' fluoroadenosine
  modified_base 19: mod_base = OTHER; note = 2' O-methyl modified nucleoside - 2' O-methyladenosine phosphorothioate linkage
  modified_base 20: mod_base = OTHER; note = 2' O-methyl modified nucleoside - 2' O-methyluridine phosphorothioate linkage
  modified_base 21: mod_base = OTHER; note = 2' O-methyl modified nucleoside - 2' O-methyluridine
tgaacatatagtaaggcaatt

SEQ ID NO: 26054 - RNA, 21 nt, synthetic construct
  source 1..21: mol_type = other RNA; note = Description of Artificial Sequence: Synthetic oligonucleotide
  modified_base 1: mod_base = OTHER; note = 2' O-methyl modified nucleoside - 2' O-methyluridine phosphorothioate linkage
  modified_base 2: mod_base = OTHER; note = 2' fluoro-modified nucleoside - 2' fluoroguanosine phosphorothioate linkage
  modified_base 3: mod_base = OTHER; note = 2' O-methyl modified nucleoside - 2' O-methyladenosine
  modified_base 4: mod_base = OTHER; note = 2' fluoro-modified nucleoside - 2' fluorocytidine
  modified_base 5: mod_base = OTHER; note = 2' O-methyl modified nucleoside - 2' O-methyladenosine
  modified_base 6: mod_base = OTHER; note = 2' fluoro-modified nucleoside - 2' fluoroguanosine
  modified_base 7: mod_base = OTHER; note = 2' O-methyl modified nucleoside - 2' O-methyladenosine
  modified_base 8: mod_base = OTHER; note = 2' fluoro-modified nucleoside - 2' fluoroadenosine
  modified_base 9: mod_base = OTHER; note = 2' O-methyl modified nucleoside - 2' O-methylcytidine
  modified_base 10: mod_base = OTHER; note = 2' fluoro-modified nucleoside - 2' fluoroadenosine
  modified_base 11: mod_base = OTHER; note = 2' O-methyl modified nucleoside - 2' O-methyluridine
  modified_base 12: mod_base = OTHER; note = 2' O-methyl modified nucleoside - 2' O-methyladenosine
  modified_base 13: mod_base = OTHER; note = 2' O-methyl modified nucleoside - 2' O-methyluridine
  modified_base 14: mod_base = OTHER; note = 2' fluoro-modified nucleoside - 2' fluoroadenosine
  modified_base 15: mod_base = OTHER; note = 2' O-methyl modified nucleoside - 2' O-methylguanosine
  modified_base 16: mod_base = OTHER; note = 2' fluoro-modified nucleoside - 2' fluorouridine
  modified_base 17: mod_base = OTHER; note = 2' O-methyl modified nucleoside - 2' O-methyladenosine
  modified_base 18: mod_base = OTHER; note = 2' fluoro-modified nucleoside - 2' fluoroadenosine
  modified_base 19: mod_base = OTHER; note = 2' O-methyl modified nucleoside - 2' O-methylguanosine phosphorothioate linkage
  modified_base 20: mod_base = OTHER; note = 2' O-methyl modified nucleoside - 2' O-methyluridine phosphorothioate linkage
  modified_base 21: mod_base = OTHER; note = 2' O-methyl modified nucleoside - 2' O-methyluridine
tgacagaacatatagtaagtt

SEQ ID NO: 26055 - RNA, 21 nt, synthetic construct
  source 1..21: mol_type = other RNA; note = Description of Artificial Sequence: Synthetic oligonucleotide
  modified_base 1: mod_base = OTHER; note = 2' O-methyl modified nucleoside - 2' O-methyluridine phosphorothioate linkage
  modified_base 2: mod_base = OTHER; note = 2' fluoro-modified nucleoside - 2' fluorouridine phosphorothioate linkage
  modified_base 3: mod_base = OTHER; note = 2' O-methyl modified nucleoside - 2' O-methylguanosine
  modified_base 4: mod_base = OTHER; note = 2' fluoro-modified nucleoside - 2' fluoroadenosine
  modified_base 5: mod_base = OTHER; note = 2' O-methyl modified nucleoside - 2' O-methylcytidine
  modified_base 6: mod_base = OTHER; note = 2' fluoro-modified nucleoside - 2' fluoroadenosine
  modified_base 7: mod_base = OTHER; note = 2' O-methyl modified nucleoside - 2' O-methylguanosine
  modified_base 8: mod_base = OTHER; note = 2' fluoro-modified nucleoside - 2' fluoroadenosine
  modified_base 9: mod_base = OTHER; note = 2' O-methyl modified nucleoside - 2' O-methyladenosine
  modified_base 10: mod_base = OTHER; note = 2' fluoro-modified nucleoside - 2' fluorocytidine
  modified_base 11: mod_base = OTHER; note = 2' O-methyl modified nucleoside - 2' O-methyladenosine
  modified_base 12: mod_base = OTHER; note = 2' O-methyl modified nucleoside - 2' O-methyluridine
  modified_base 13: mod_base = OTHER; note = 2' O-methyl modified nucleoside - 2' O-methyladenosine
  modified_base 14: mod_base = OTHER; note = 2' fluoro-modified nucleoside - 2' fluorouridine
  modified_base 15: mod_base = OTHER; note = 2' O-methyl modified nucleoside - 2' O-methyladenosine
  modified_base 16: mod_base = OTHER; note = 2' fluoro-modified nucleoside - 2' fluoroguanosine
  modified_base 17: mod_base = OTHER; note = 2' O-methyl modified nucleoside - 2' O-methyluridine
  modified_base 18: mod_base = OTHER; note = 2' fluoro-modified nucleoside - 2' fluoroadenosine
  modified_base 19: mod_base = OTHER; note = 2' O-methyl modified nucleoside - 2' O-methyladenosine phosphorothioate linkage
  modified_base 20: mod_base = OTHER; note = 2' O-methyl modified nucleoside - 2' O-methyluridine phosphorothioate linkage
  modified_base 21: mod_base = OTHER; note = 2' O-methyl modified nucleoside - 2' O-methyluridine
ttgacagaacatatagtaatt

SEQ ID NO: 26056 - RNA, 21 nt, synthetic construct
  source 1..21: mol_type = other RNA; note = Description of Artificial Sequence: Synthetic oligonucleotide
  modified_base 1: mod_base = OTHER; note = 2' O-methyl modified nucleoside - 2' O-methyluridine phosphorothioate linkage
  modified_base 2: mod_base = OTHER; note = 2' fluoro-modified nucleoside - 2' fluorouridine phosphorothioate linkage
  modified_base 3: mod_base = OTHER; note = 2' O-methyl modified nucleoside - 2' O-methyladenosine
  modified_base 4: mod_base = OTHER; note = 2' fluoro-modified nucleoside - 2' fluorocytidine
  modified_base 5: mod_base = OTHER; note = 2' O-methyl modified nucleoside - 2' O-methyladenosine
  modified_base 6: mod_base = OTHER; note = 2' fluoro-modified nucleoside - 2' fluoroadenosine
  modified_base 7: mod_base = OTHER; note = 2' O-methyl modified nucleoside - 2' O-methylguanosine
  modified_base 8: mod_base = OTHER; note = 2' fluoro-modified nucleoside - 2' fluorouridine
  modified_base 9: mod_base = OTHER; note = 2' O-methyl modified nucleoside - 2' O-methyluridine
  modified_base 10: mod_base = OTHER; note = 2' fluoro-modified nucleoside - 2' fluoroguanosine
  modified_base 11: mod_base = OTHER; note = 2' O-methyl modified nucleoside - 2' O-methyluridine
  modified_base 12: mod_base = OTHER; note = 2' O-methyl modified nucleoside - 2' O-methyladenosine
  modified_base 13: mod_base = OTHER; note = 2' O-methyl modified nucleoside - 2' O-methyladenosine
  modified_base 14: mod_base = OTHER; note = 2' fluoro-modified nucleoside - 2' fluoroguanosine
  modified_base 15: mod_base = OTHER; note = 2' O-methyl modified nucleoside - 2' O-methyladenosine
  modified_base 16: mod_base = OTHER; note = 2' fluoro-modified nucleoside - 2' fluorouridine
  modified_base 17: mod_base = OTHER; note = 2' O-methyl modified nucleoside - 2' O-methylguanosine
  modified_base 18: mod_base = OTHER; note = 2' fluoro-modified nucleoside - 2' fluoroadenosine
  modified_base 19: mod_base = OTHER; note = 2' O-methyl modified nucleoside - 2' O-methyladenosine phosphorothioate linkage
  modified_base 20: mod_base = OTHER; note = 2' O-methyl modified nucleoside - 2' O-methyluridine phosphorothioate linkage
  modified_base 21: mod_base = OTHER; note = 2' O-methyl modified nucleoside - 2' O-methyluridine
ttacaagttgtaagatgaatt

SEQ ID NO: 26057 - RNA, 21 nt, synthetic construct
  source 1..21: mol_type = other RNA; note = Description of Artificial Sequence: Synthetic oligonucleotide
  modified_base 1: mod_base = OTHER; note = 2' O-methyl modified nucleoside - 2' O-methyluridine phosphorothioate linkage
  modified_base 2: mod_base = OTHER; note = 2' fluoro-modified nucleoside - 2' fluoroadenosine phosphorothioate linkage
  modified_base 3: mod_base = OTHER; note = 2' O-methyl modified nucleoside - 2' O-methylcytidine
  modified_base 4: mod_base = OTHER; note = 2' fluoro-modified nucleoside - 2' fluoroadenosine
  modified_base 5: mod_base = OTHER; note = 2' O-methyl modified nucleoside - 2' O-methylcytidine
  modified_base 6: mod_base = OTHER; note = 2' fluoro-modified nucleoside - 2' fluorocytidine
  modified_base 7: mod_base = OTHER; note = 2' O-methyl modified nucleoside - 2' O-methyladenosine
  modified_base 8: mod_base = OTHER; note = 2' fluoro-modified nucleoside - 2' fluoroguanosine
  modified_base 9: mod_base = OTHER; note = 2' O-methyl modified nucleoside - 2' O-methylcytidine
  modified_base 10: mod_base = OTHER; note = 2' fluoro-modified nucleoside - 2' fluorocytidine
  modified_base 11: mod_base = OTHER; note = 2' O-methyl modified nucleoside - 2' O-methylcytidine
  modified_base 12: mod_base = OTHER; note = 2' O-methyl modified nucleoside - 2' O-methyluridine
  modified_base 13: mod_base = OTHER; note = 2' O-methyl modified nucleoside - 2' O-methyladenosine
  modified_base 14: mod_base = OTHER; note = 2' fluoro-modified nucleoside - 2' fluorocytidine
  modified_base 15: mod_base = OTHER; note = 2' O-methyl modified nucleoside - 2' O-methyladenosine
  modified_base 16: mod_base = OTHER; note = 2' fluoro-modified nucleoside - 2' fluoroadenosine
  modified_base 17: mod_base = OTHER; note = 2' O-methyl modified nucleoside - 2' O-methylguanosine
  modified_base 18: mod_base = OTHER; note = 2' fluoro-modified nucleoside - 2' fluorouridine
  modified_base 19: mod_base = OTHER; note = 2' O-methyl modified nucleoside - 2' O-methyluridine phosphorothioate linkage
  modified_base 20: mod_base = OTHER; note = 2' O-methyl modified nucleoside - 2' O-methyluridine phosphorothioate linkage
  modified_base 21: mod_base = OTHER; note = 2' O-methyl modified nucleoside - 2' O-methyluridine
tacaccagccctacaagtttt

SEQ ID NO: 26058 - RNA, 21 nt, synthetic construct
  source 1..21: mol_type = other RNA; note = Description of Artificial Sequence: Synthetic oligonucleotide
  modified_base 1: mod_base = OTHER; note = 2' O-methyl modified nucleoside - 2' O-methyluridine phosphorothioate linkage
  modified_base 2: mod_base = OTHER; note = 2' fluoro-modified nucleoside - 2' fluoroguanosine phosphorothioate linkage
  modified_base 3: mod_base = OTHER; note = 2' O-methyl modified nucleoside - 2' O-methyluridine
  modified_base 4: mod_base = OTHER; note = 2' fluoro-modified nucleoside - 2' fluorouridine
  modified_base 5: mod_base = OTHER; note = 2' O-methyl modified nucleoside - 2' O-methyladenosine
  modified_base 6: mod_base = OTHER; note = 2' fluoro-modified nucleoside - 2' fluoroadenosine
  modified_base 7: mod_base = OTHER; note = 2' O-methyl modified nucleoside - 2' O-methylcytidine
  modified_base 8: mod_base = OTHER; note = 2' fluoro-modified nucleoside - 2' fluoroadenosine
  modified_base 9: mod_base = OTHER; note = 2' O-methyl modified nucleoside - 2' O-methylcytidine
  modified_base 10: mod_base = OTHER; note = 2' fluoro-modified nucleoside - 2' fluorocytidine
  modified_base 11: mod_base = OTHER; note = 2' O-methyl modified nucleoside - 2' O-methyladenosine
  modified_base 12: mod_base = OTHER; note = 2' O-methyl modified nucleoside - 2' O-methylguanosine
  modified_base 13: mod_base = OTHER; note = 2' O-methyl modified nucleoside - 2' O-methylcytidine
  modified_base 14: mod_base = OTHER; note = 2' fluoro-modified nucleoside - 2' fluorocytidine
  modified_base 15: mod_base = OTHER; note = 2' O-methyl modified nucleoside - 2' O-methylcytidine
  modified_base 16: mod_base = OTHER; note = 2' fluoro-modified nucleoside - 2' fluorouridine
  modified_base 17: mod_base = OTHER; note = 2' O-methyl modified nucleoside - 2' O-methyladenosine
  modified_base 18: mod_base = OTHER; note = 2' fluoro-modified nucleoside - 2' fluorocytidine
  modified_base 19: mod_base = OTHER; note = 2' O-methyl modified nucleoside - 2' O-methyladenosine phosphorothioate linkage
  modified_base 20: mod_base = OTHER; note = 2' O-methyl modified nucleoside - 2' O-methyluridine phosphorothioate linkage
  modified_base 21: mod_base = OTHER; note = 2' O-methyl modified nucleoside - 2' O-methyluridine
tgttaacaccagccctacatt

SEQ ID NO: 26059 - RNA, 21 nt, synthetic construct
  source 1..21: mol_type = other RNA; note = Description of Artificial Sequence: Synthetic oligonucleotide
  modified_base 1: mod_base = OTHER; note = 2' O-methyl modified nucleoside - 2' O-methyluridine phosphorothioate linkage
  modified_base 2: mod_base = OTHER; note = 2' fluoro-modified nucleoside - 2' fluorouridine phosphorothioate linkage
  modified_base 3: mod_base = OTHER; note = 2' O-methyl modified nucleoside - 2' O-methylcytidine
  modified_base 4: mod_base = OTHER; note = 2' fluoro-modified nucleoside - 2' fluoroguanosine
  modified_base 5: mod_base = OTHER; note = 2' O-methyl modified nucleoside - 2' O-methyluridine
  modified_base 6: mod_base = OTHER; note = 2' fluoro-modified nucleoside - 2' fluoroadenosine
  modified_base 7: mod_base = OTHER; note = 2' O-methyl modified nucleoside - 2' O-methyladenosine
  modified_base 8: mod_base = OTHER; note = 2' fluoro-modified nucleoside - 2' fluoroguanosine
  modified_base 9: mod_base = OTHER; note = 2' O-methyl modified nucleoside - 2' O-methyluridine
  modified_base 10: mod_base = OTHER; note = 2' fluoro-modified nucleoside - 2' fluorouridine
  modified_base 11: mod_base = OTHER; note = 2' O-methyl modified nucleoside - 2' O-methyladenosine
  modified_base 12: mod_base = OTHER; note = 2' O-methyl modified nucleoside - 2' O-methyladenosine
  modified_base 13: mod_base = OTHER; note = 2' O-methyl modified nucleoside - 2' O-methylcytidine
  modified_base 14: mod_base = OTHER; note = 2' fluoro-modified nucleoside - 2' fluoroadenosine
  modified_base 15: mod_base = OTHER; note = 2' O-methyl modified nucleoside - 2' O-methylcytidine
  modified_base 16: mod_base = OTHER; note = 2' fluoro-modified nucleoside - 2' fluorocytidine
  modified_base 17: mod_base = OTHER; note = 2' O-methyl modified nucleoside - 2' O-methyladenosine
  modified_base 18: mod_base = OTHER; note = 2' fluoro-modified nucleoside - 2' fluoroguanosine
  modified_base 19: mod_base = OTHER; note = 2' O-methyl modified nucleoside - 2' O-methylcytidine phosphorothioate linkage
  modified_base 20: mod_base = OTHER; note = 2' O-methyl modified nucleoside - 2' O-methyluridine phosphorothioate linkage
  modified_base 21: mod_base = OTHER; note = 2' O-methyl modified nucleoside - 2' O-methyluridine
ttcgtaagttaacaccagctt

SEQ ID NO: 26060 - RNA, 21 nt, synthetic construct
  source 1..21: mol_type = other RNA; note = Description of Artificial Sequence: Synthetic oligonucleotide
  modified_base 1: mod_base = OTHER; note = 2' O-methyl modified nucleoside - 2' O-methyluridine phosphorothioate linkage
  modified_base 2: mod_base = OTHER; note = 2' fluoro-modified nucleoside - 2' fluoroadenosine phosphorothioate linkage
  modified_base 3: mod_base = OTHER; note = 2' O-methyl modified nucleoside - 2' O-methylguanosine
  modified_base 4: mod_base = OTHER; note = 2' fluoro-modified nucleoside - 2' fluorouridine
  modified_base 5: mod_base = OTHER; note = 2' O-methyl modified nucleoside - 2' O-methylcytidine
  modified_base 6: mod_base = OTHER; note = 2' fluoro-modified nucleoside - 2' fluoroguanosine
  modified_base 7: mod_base = OTHER; note = 2' O-methyl modified nucleoside - 2' O-methyluridine
  modified_base 8: mod_base = OTHER; note = 2' fluoro-modified nucleoside - 2' fluoroadenosine
  modified_base 9: mod_base = OTHER; note = 2' O-methyl modified nucleoside - 2' O-methyladenosine
  modified_base 10: mod_base = OTHER; note = 2' fluoro-modified nucleoside - 2' fluoroguanosine
  modified_base 11: mod_base = OTHER; note = 2' O-methyl modified nucleoside - 2' O-methyluridine
  modified_base 12: mod_base = OTHER; note = 2' O-methyl modified nucleoside - 2' O-methyluridine
  modified_base 13: mod_base = OTHER; note = 2' O-methyl modified nucleoside - 2' O-methyladenosine
  modified_base 14: mod_base = OTHER; note = 2' fluoro-modified nucleoside - 2' fluoroadenosine
  modified_base 15: mod_base = OTHER; note = 2' O-methyl modified nucleoside - 2' O-methylcytidine
  modified_base 16: mod_base = OTHER; note = 2' fluoro-modified nucleoside - 2' fluoroadenosine
  modified_base 17: mod_base = OTHER; note = 2' O-methyl modified nucleoside - 2' O-methylcytidine
  modified_base 18: mod_base = OTHER; note = 2' fluoro-modified nucleoside - 2' fluorocytidine
  modified_base 19: mod_base = OTHER; note = 2' O-methyl modified nucleoside - 2' O-methyladenosine phosphorothioate linkage
  modified_base 20: mod_base = OTHER; note = 2' O-methyl modified nucleoside - 2' O-methyluridine phosphorothioate linkage
  modified_base 21: mod_base = OTHER; note = 2' O-methyl modified nucleoside - 2' O-methyluridine
tagtcgtaagttaacaccatt

SEQ ID NO: 26061 - RNA, 21 nt, synthetic construct
  source 1..21: mol_type = other RNA; note = Description of Artificial Sequence: Synthetic oligonucleotide
  modified_base 1: mod_base = OTHER; note = 2' O-methyl modified nucleoside - 2' O-methyluridine phosphorothioate linkage
  modified_base 2: mod_base = OTHER; note = 2' fluoro-modified nucleoside - 2' fluoroadenosine phosphorothioate linkage
  modified_base 3: mod_base = OTHER; note = 2' O-methyl modified nucleoside - 2' O-methyladenosine
  modified_base 4: mod_base = OTHER; note = 2' fluoro-modified nucleoside - 2' fluoroguanosine
  modified_base 5: mod_base = OTHER; note = 2' O-methyl modified nucleoside - 2' O-methyluridine
  modified_base 6: mod_base = OTHER; note = 2' fluoro-modified nucleoside - 2' fluorocytidine
  modified_base 7: mod_base = OTHER; note = 2' O-methyl modified nucleoside - 2' O-methylguanosine
  modified_base 8: mod_base = OTHER; note = 2' fluoro-modified nucleoside - 2' fluorouridine
  modified_base 9: mod_base = OTHER; note = 2' O-methyl modified nucleoside - 2' O-methyladenosine
  modified_base 10: mod_base = OTHER; note = 2' fluoro-modified nucleoside - 2' fluoroadenosine
  modified_base 11: mod_base = OTHER; note = 2' O-methyl modified nucleoside - 2' O-methylguanosine
  modified_base 12: mod_base = OTHER; note = 2' O-methyl modified nucleoside - 2' O-methyluridine
  modified_base 13: mod_base = OTHER; note = 2' O-methyl modified nucleoside - 2' O-methyluridine
  modified_base 14: mod_base = OTHER; note = 2' fluoro-modified nucleoside - 2' fluoroadenosine
  modified_base 15: mod_base = OTHER; note = 2' O-methyl modified nucleoside - 2' O-methyladenosine
  modified_base 16: mod_base = OTHER; note = 2' fluoro-modified nucleoside - 2' fluorocytidine
  modified_base 17: mod_base = OTHER; note = 2' O-methyl modified nucleoside - 2' O-methyladenosine
  modified_base 18: mod_base = OTHER; note = 2' fluoro-modified nucleoside - 2' fluorocytidine
  modified_base 19: mod_base = OTHER; note = 2' O-methyl modified nucleoside - 2' O-methylcytidine phosphorothioate linkage
  modified_base 20: mod_base = OTHER; note = 2' O-methyl modified nucleoside - 2' O-methyluridine phosphorothioate linkage
  modified_base 21: mod_base = OTHER; note = 2' O-methyl modified nucleoside - 2' O-methyluridine
taagtcgtaagttaacacctt

SEQ ID NO: 26062 - RNA, 21 nt, synthetic construct
  source 1..21: mol_type = other RNA; note = Description of Artificial Sequence: Synthetic oligonucleotide
  modified_base 1: mod_base = OTHER; note = 2' O-methyl modified nucleoside - 2' O-methyluridine phosphorothioate linkage
  modified_base 2: mod_base = OTHER; note = 2' fluoro-modified nucleoside - 2' fluoroguanosine phosphorothioate linkage
  modified_base 3: mod_base = OTHER; note = 2' O-methyl modified nucleoside - 2' O-methyladenosine
  modified_base 4: mod_base = OTHER; note = 2' fluoro-modified nucleoside - 2' fluoroadenosine
  modified_base 5: mod_base = OTHER; note = 2' O-methyl modified nucleoside - 2' O-methylguanosine
  modified_base 6: mod_base = OTHER; note = 2' fluoro-modified nucleoside - 2' fluorouridine
  modified_base 7: mod_base = OTHER; note = 2' O-methyl modified nucleoside - 2' O-methylcytidine
  modified_base 8: mod_base = OTHER; note = 2' fluoro-modified nucleoside - 2' fluoroguanosine
  modified_base 9: mod_base = OTHER; note = 2' O-methyl modified nucleoside - 2' O-methyluridine
  modified_base 10: mod_base = OTHER; note = 2' fluoro-modified nucleoside - 2' fluoroadenosine
  modified_base 11: mod_base = OTHER; note = 2' O-methyl modified nucleoside - 2' O-methyladenosine
  modified_base 12: mod_base = OTHER; note = 2' O-methyl modified nucleoside - 2' O-methylguanosine
  modified_base 13: mod_base = OTHER; note = 2' O-methyl modified nucleoside - 2' O-methyluridine
  modified_base 14: mod_base = OTHER; note = 2' fluoro-modified nucleoside - 2' fluorouridine
  modified_base 15: mod_base = OTHER; note = 2' O-methyl modified nucleoside - 2' O-methyladenosine
  modified_base 16: mod_base = OTHER; note = 2' fluoro-modified nucleoside - 2' fluoroadenosine
  modified_base 17: mod_base = OTHER; note = 2' O-methyl modified nucleoside - 2' O-methylcytidine
  modified_base 18: mod_base = OTHER; note = 2' fluoro-modified nucleoside - 2' fluoroadenosine
  modified_base 19: mod_base = OTHER; note = 2' O-methyl modified nucleoside - 2' O-methylcytidine phosphorothioate linkage
  modified_base 20: mod_base = OTHER; note = 2' O-methyl modified nucleoside - 2' O-methyluridine phosphorothioate linkage
  modified_base 21: mod_base = OTHER; note = 2' O-methyl modified nucleoside - 2' O-methyluridine
tgaagtcgtaagttaacactt

SEQ ID NO: 26063 - RNA, 21 nt, synthetic construct
  source 1..21: mol_type = other RNA; note = Description of Artificial Sequence: Synthetic oligonucleotide
  modified_base 1: mod_base = OTHER; note = 2' O-methyl modified nucleoside - 2' O-methyluridine phosphorothioate linkage
  modified_base 2: mod_base = OTHER; note = 2' fluoro-modified nucleoside - 2' fluoroguanosine phosphorothioate linkage
  modified_base 3: mod_base = OTHER; note = 2' O-methyl modified nucleoside - 2' O-methyluridine
  modified_base 4: mod_base = OTHER; note = 2' fluoro-modified nucleoside - 2' fluoroguanosine
  modified_base 5: mod_base = OTHER; note = 2' O-methyl modified nucleoside - 2' O-methyladenosine
  modified_base 6: mod_base = OTHER; note = 2' fluoro-modified nucleoside - 2' fluoroadenosine
  modified_base 7: mod_base = OTHER; note = 2' O-methyl modified nucleoside - 2' O-methylguanosine
  modified_base 8: mod_base = OTHER; note = 2' fluoro-modified nucleoside - 2' fluorouridine
  modified_base 9: mod_base = OTHER; note = 2' O-methyl modified nucleoside - 2' O-methylcytidine
  modified_base 10: mod_base = OTHER; note = 2' fluoro-modified nucleoside - 2' fluoroguanosine
  modified_base 11: mod_base = OTHER; note = 2' O-methyl modified nucleoside - 2' O-methyluridine
  modified_base 12: mod_base = OTHER; note = 2' O-methyl modified nucleoside - 2' O-methyladenosine
  modified_base 13: mod_base = OTHER; note = 2' O-methyl modified nucleoside - 2' O-methyladenosine
  modified_base 14: mod_base = OTHER; note = 2' fluoro-modified nucleoside - 2' fluoroguanosine
  modified_base 15: mod_base = OTHER; note = 2' O-methyl modified nucleoside - 2' O-methyluridine
  modified_base 16: mod_base = OTHER; note = 2' fluoro-modified nucleoside - 2' fluorouridine
  modified_base 17: mod_base = OTHER; note = 2' O-methyl modified nucleoside - 2' O-methyladenosine
  modified_base 18: mod_base = OTHER; note = 2' fluoro-modified nucleoside - 2' fluoroadenosine
  modified_base 19: mod_base = OTHER; note = 2' O-methyl modified nucleoside - 2' O-methylcytidine phosphorothioate linkage
  modified_base 20: mod_base = OTHER; note = 2' O-methyl modified nucleoside - 2' O-methyluridine phosphorothioate linkage
  modified_base 21: mod_base = OTHER; note = 2' O-methyl modified nucleoside - 2' O-methyluridine
tgtgaagtcgtaagttaactt

SEQ ID NO: 26064 - RNA, 21 nt, synthetic construct
  source 1..21: mol_type = other RNA; note = Description of Artificial Sequence: Synthetic oligonucleotide
  modified_base 1: mod_base = OTHER; note = 2' O-methyl modified nucleoside - 2' O-methyluridine phosphorothioate linkage
  modified_base 2: mod_base = OTHER; note = 2' fluoro-modified nucleoside - 2' fluoroadenosine phosphorothioate linkage
  modified_base 3: mod_base = OTHER; note = 2' O-methyl modified nucleoside - 2' O-methylguanosine
  modified_base 4: mod_base = OTHER; note = 2' fluoro-modified nucleoside - 2' fluorouridine
  modified_base 5: mod_base = OTHER; note = 2' O-methyl modified nucleoside - 2' O-methylguanosine
  modified_base 6: mod_base = OTHER; note = 2' fluoro-modified nucleoside - 2' fluoroadenosine
  modified_base 7: mod_base = OTHER; note = 2' O-methyl modified nucleoside - 2' O-methyladenosine
  modified_base 8: mod_base = OTHER; note = 2' fluoro-modified nucleoside - 2' fluoroguanosine
  modified_base 9: mod_base = OTHER; note = 2' O-methyl modified nucleoside - 2' O-methyluridine
  modified_base 10: mod_base = OTHER; note = 2' fluoro-modified nucleoside - 2' fluorocytidine
  modified_base 11: mod_base = OTHER; note = 2' O-methyl modified nucleoside - 2' O-methylguanosine
  modified_base 12: mod_base = OTHER; note = 2' O-methyl modified nucleoside - 2' O-methyluridine
  modified_base 13: mod_base = OTHER; note = 2' O-methyl modified nucleoside - 2' O-methyladenosine
  modified_base 14: mod_base = OTHER; note = 2' fluoro-modified nucleoside - 2' fluoroadenosine
  modified_base 15: mod_base = OTHER; note = 2' O-methyl modified nucleoside - 2' O-methylguanosine
  modified_base 16: mod_base = OTHER; note = 2' fluoro-modified nucleoside - 2' fluorouridine
  modified_base 17: mod_base = OTHER; note = 2' O-methyl modified nucleoside - 2' O-methyluridine
  modified_base 18: mod_base = OTHER; note = 2' fluoro-modified nucleoside - 2' fluoroadenosine
  modified_base 19: mod_base = OTHER; note = 2' O-methyl modified nucleoside - 2' O-methyladenosine phosphorothioate linkage
  modified_base 20: mod_base = OTHER; note = 2' O-methyl modified nucleoside - 2' O-methyluridine phosphorothioate linkage
  modified_base 21: mod_base = OTHER; note = 2' O-methyl modified nucleoside - 2' O-methyluridine
tagtgaagtcgtaagttaatt

SEQ ID NO: 26065 - RNA, 21 nt, synthetic construct
  source 1..21: mol_type = other RNA; note = Description of Artificial Sequence: Synthetic oligonucleotide
  modified_base 1: mod_base = OTHER; note = 2' O-methyl modified nucleoside - 2' O-methyluridine phosphorothioate linkage
  modified_base 2: mod_base = OTHER; note = 2' fluoro-modified nucleoside - 2' fluoroguanosine phosphorothioate linkage
  modified_base 3: mod_base = OTHER; note = 2' O-methyl modified nucleoside - 2' O-methyluridine
  modified_base 4: mod_base = OTHER; note = 2' fluoro-modified nucleoside - 2' fluorouridine
  modified_base 5: mod_base = OTHER; note = 2' O-methyl modified nucleoside - 2' O-methyladenosine
  modified_base 6: mod_base = OTHER; note = 2' fluoro-modified nucleoside - 2' fluoroguanosine
  modified_base 7: mod_base = OTHER; note = 2' O-methyl modified nucleoside - 2' O-methyluridine
  modified_base 8: mod_base = OTHER; note = 2' fluoro-modified nucleoside - 2' fluoroguanosine
  modified_base 9: mod_base = OTHER; note = 2' O-methyl modified nucleoside - 2' O-methyladenosine
  modified_base 10: mod_base = OTHER; note = 2' fluoro-modified nucleoside - 2' fluoroadenosine
  modified_base 11: mod_base = OTHER; note = 2' O-methyl modified nucleoside - 2' O-methylguanosine
  modified_base 12: mod_base = OTHER; note = 2' O-methyl modified nucleoside - 2' O-methyluridine
  modified_base 13: mod_base = OTHER; note = 2' O-methyl modified nucleoside - 2' O-methylcytidine
  modified_base 14: mod_base = OTHER; note = 2' fluoro-modified nucleoside - 2' fluoroguanosine
  modified_base 15: mod_base = OTHER; note = 2' O-methyl modified nucleoside - 2' O-methyluridine
  modified_base 16: mod_base = OTHER; note = 2' fluoro-modified nucleoside - 2' fluoroadenosine
  modified_base 17: mod_base = OTHER; note = 2' O-methyl modified nucleoside - 2' O-methyladenosine
  modified_base 18: mod_base = OTHER; note = 2' fluoro-modified nucleoside - 2' fluoroguanosine
  modified_base 19: mod_base = OTHER; note = 2' O-methyl modified nucleoside - 2' O-methyluridine phosphorothioate linkage
  modified_base 20: mod_base = OTHER; note = 2' O-methyl modified nucleoside - 2' O-methyluridine phosphorothioate linkage
  modified_base 21: mod_base = OTHER; note = 2' O-methyl modified nucleoside - 2' O-methyluridine
tgttagtgaagtcgtaagttt

SEQ ID NO: 26066 - RNA, 21 nt, synthetic construct
  source 1..21: mol_type = other RNA; note = Description of Artificial Sequence: Synthetic oligonucleotide
  modified_base 1: mod_base = OTHER; note = 2' O-methyl modified nucleoside - 2' O-methyluridine phosphorothioate linkage
  modified_base 2: mod_base = OTHER; note = 2' fluoro-modified nucleoside - 2' fluoroadenosine phosphorothioate linkage
  modified_base 3: mod_base = OTHER; note = 2' O-methyl modified nucleoside - 2' O-methylguanosine
  modified_base 4: mod_base = OTHER; note = 2' fluoro-modified nucleoside - 2' fluorouridine
  modified_base 5: mod_base = OTHER; note = 2' O-methyl modified nucleoside - 2' O-methyluridine
  modified_base 6: mod_base = OTHER; note = 2' fluoro-modified nucleoside - 2' fluoroadenosine
  modified_base 7: mod_base = OTHER; note = 2' O-methyl modified nucleoside - 2' O-methylguanosine
  modified_base 8: mod_base = OTHER; note = 2' fluoro-modified nucleoside - 2' fluorouridine
  modified_base 9: mod_base = OTHER; note = 2' O-methyl modified nucleoside - 2' O-methylguanosine
  modified_base 10: mod_base = OTHER; note = 2' fluoro-modified nucleoside - 2' fluoroadenosine
  modified_base 11: mod_base = OTHER; note = 2' O-methyl modified nucleoside - 2' O-methyladenosine
  modified_base 12: mod_base = OTHER; note = 2' O-methyl modified nucleoside - 2' O-methylguanosine
  modified_base 13: mod_base = OTHER; note = 2' O-methyl modified nucleoside - 2' O-methyluridine
  modified_base 14: mod_base = OTHER; note = 2' fluoro-modified nucleoside - 2' fluorocytidine
  modified_base 15: mod_base = OTHER; note = 2' O-methyl modified nucleoside - 2' O-methylguanosine
  modified_base 16: mod_base = OTHER; note = 2' fluoro-modified nucleoside - 2' fluorouridine
  modified_base 17: mod_base = OTHER; note = 2' O-methyl modified nucleoside - 2' O-methyladenosine
  modified_base 18: mod_base = OTHER; note = 2' fluoro-modified nucleoside - 2' fluoroadenosine
  modified_base 19: mod_base = OTHER; note = 2' O-methyl modified nucleoside - 2' O-methylguanosine phosphorothioate linkage
  modified_base 20: mod_base = OTHER; note = 2' O-methyl modified nucleoside - 2' O-methyluridine phosphorothioate linkage
  modified_base 21: mod_base = OTHER; note = 2' O-methyl modified nucleoside - 2' O-methyluridine
tagttagtgaagtcgtaagtt

SEQ ID NO: 26067 - RNA, 21 nt, synthetic construct
  source 1..21: mol_type = other RNA; note = Description of Artificial Sequence: Synthetic oligonucleotide
  modified_base 1: mod_base = OTHER; note = 2' O-methyl modified nucleoside - 2' O-methyluridine phosphorothioate linkage
  modified_base 2: mod_base = OTHER; note = 2' fluoro-modified nucleoside - 2' fluoroadenosine phosphorothioate linkage
  modified_base 3: mod_base = OTHER; note = 2' O-methyl modified nucleoside - 2' O-methylcytidine
  modified_base 4: mod_base = OTHER; note = 2' fluoro-modified nucleoside - 2' fluoroadenosine
  modified_base 5: mod_base = OTHER; note = 2' O-methyl modified nucleoside - 2' O-methylguanosine
  modified_base 6: mod_base = OTHER; note = 2' fluoro-modified nucleoside - 2' fluorouridine
  modified_base 7: mod_base = OTHER; note = 2' O-methyl modified nucleoside - 2' O-methyluridine
  modified_base 8: mod_base = OTHER; note = 2' fluoro-modified nucleoside - 2' fluoroadenosine
  modified_base 9: mod_base = OTHER; note = 2' O-methyl modified nucleoside - 2' O-methylguanosine
  modified_base 10: mod_base = OTHER; note = 2' fluoro-modified nucleoside - 2' fluorouridine
  modified_base 11: mod_base = OTHER; note = 2' O-methyl modified nucleoside - 2' O-methylguanosine
  modified_base 12: mod_base = OTHER; note = 2' O-methyl modified nucleoside - 2' O-methyladenosine
  modified_base 13: mod_base = OTHER; note = 2' O-methyl modified nucleoside - 2' O-methyladenosine
  modified_base 14: mod_base = OTHER; note = 2' fluoro-modified nucleoside - 2' fluoroguanosine
  modified_base 15: mod_base = OTHER; note = 2' O-methyl modified nucleoside - 2' O-methyluridine
  modified_base 16: mod_base = OTHER; note = 2' fluoro-modified nucleoside - 2' fluorocytidine
  modified_base 17: mod_base = OTHER; note = 2' O-methyl modified nucleoside - 2' O-methylguanosine
  modified_base 18: mod_base = OTHER; note = 2' fluoro-modified nucleoside - 2' fluorouridine
  modified_base 19: mod_base = OTHER; note = 2' O-methyl modified nucleoside - 2' O-methyladenosine phosphorothioate linkage
  modified_base 20: mod_base = OTHER; note = 2' O-methyl modified nucleoside - 2' O-methyluridine phosphorothioate linkage
  modified_base 21: mod_base = OTHER; note = 2' O-methyl modified nucleoside - 2' O-methyluridine
tacagttagtgaagtcgtatt

SEQ ID NO: 26068 - RNA, 21 nt, synthetic construct
  source 1..21: mol_type = other RNA; note = Description of Artificial Sequence: Synthetic oligonucleotide
  modified_base 1: mod_base = OTHER; note = 2' O-methyl modified nucleoside - 2' O-methyluridine phosphorothioate linkage
  modified_base 2: mod_base = OTHER; note = 2' fluoro-modified nucleoside - 2' fluoroadenosine phosphorothioate linkage
  modified_base 3: mod_base = OTHER; note = 2' O-methyl modified nucleoside - 2' O-methylcytidine
  modified_base 4: mod_base = OTHER; note = 2' fluoro-modified nucleoside - 2' fluorouridine
  modified_base 5: mod_base = OTHER; note = 2' O-methyl modified nucleoside - 2' O-methylguanosine
  modified_base 6: mod_base = OTHER; note = 2' fluoro-modified nucleoside - 2' fluoroadenosine
  modified_base 7: mod_base = OTHER; note = 2' O-methyl modified nucleoside - 2' O-methylguanosine
  modified_base 8: mod_base = OTHER; note = 2' fluoro-modified nucleoside - 2' fluoroadenosine
  modified_base 9: mod_base = OTHER; note = 2' O-methyl modified nucleoside - 2' O-methyluridine
  modified_base 10: mod_base = OTHER; note = 2' fluoro-modified nucleoside - 2' fluoroadenosine
  modified_base 11: mod_base = OTHER; note = 2' O-methyl modified nucleoside - 2' O-methylguanosine
  modified_base 12: mod_base = OTHER; note = 2' O-methyl modified nucleoside - 2' O-methylguanosine
  modified_base 13: mod_base = OTHER; note = 2' O-methyl modified nucleoside - 2' O-methylcytidine
  modified_base 14: mod_base = OTHER; note = 2' fluoro-modified nucleoside - 2' fluorouridine
  modified_base 15: mod_base = OTHER; note = 2' O-methyl modified nucleoside - 2' O-methylguanosine
  modified_base 16: mod_base = OTHER; note = 2' fluoro-modified nucleoside - 2' fluorocytidine
  modified_base 17: mod_base = OTHER; note = 2' O-methyl modified nucleoside - 2' O-methyluridine
  modified_base 18: mod_base = OTHER; note = 2' fluoro-modified nucleoside - 2' fluorouridine
  modified_base 19: mod_base = OTHER; note = 2' O-methyl modified nucleoside - 2' O-methyluridine phosphorothioate linkage
  modified_base 20: mod_base = OTHER; note = 2' O-methyl modified nucleoside - 2' O-methyluridine phosphorothioate linkage
  modified_base 21: mod_base = OTHER; note = 2' O-methyl modified nucleoside - 2' O-methyluridine
tactgagataggctgcttttt

SEQ ID NO: 26069 - RNA, 21 nt, synthetic construct
  source 1..21: mol_type = other RNA; note = Description of Artificial Sequence: Synthetic oligonucleotide
  modified_base 1: mod_base = OTHER; note = 2' O-methyl modified nucleoside - 2' O-methyluridine phosphorothioate linkage
  modified_base 2: mod_base = OTHER; note = 2' fluoro-modified nucleoside - 2' fluoroadenosine phosphorothioate linkage
  modified_base 3: mod_base = OTHER; note = 2' O-methyl modified nucleoside - 2' O-methyluridine
  modified_base 4: mod_base = OTHER; note = 2' fluoro-modified nucleoside - 2' fluoroadenosine
  modified_base 5: mod_base = OTHER; note = 2' O-methyl modified nucleoside - 2' O-methylguanosine
  modified_base 6: mod_base = OTHER; note = 2' fluoro-modified nucleoside - 2' fluorouridine
  modified_base 7: mod_base = OTHER; note = 2' O-methyl modified nucleoside - 2' O-methyladenosine
  modified_base 8: mod_base = OTHER; note = 2' fluoro-modified nucleoside - 2' fluorocytidine
  modified_base 9: mod_base = OTHER; note = 2' O-methyl modified nucleoside - 2' O-methyluridine
  modified_base 10: mod_base = OTHER; note = 2' fluoro-modified nucleoside - 2' fluoroguanosine
  modified_base 11: mod_base = OTHER; note = 2' O-methyl modified nucleoside - 2' O-methyladenosine
  modified_base 12: mod_base = OTHER; note = 2' O-methyl modified nucleoside - 2' O-methylguanosine
  modified_base 13: mod_base = OTHER; note = 2' O-methyl modified nucleoside - 2' O-methyladenosine
  modified_base 14: mod_base = OTHER; note = 2' fluoro-modified nucleoside - 2' fluorouridine
  modified_base 15: mod_base = OTHER; note = 2' O-methyl modified nucleoside - 2' O-methyladenosine
  modified_base 16: mod_base = OTHER; note = 2' fluoro-modified nucleoside - 2' fluoroguanosine
  modified_base 17: mod_base = OTHER; note = 2' O-methyl modified nucleoside - 2' O-methylguanosine
  modified_base 18: mod_base = OTHER; note = 2' fluoro-modified nucleoside - 2' fluorocytidine
  modified_base 19: mod_base = OTHER; note = 2' O-methyl modified nucleoside - 2' O-methyluridine phosphorothioate linkage
  modified_base 20: mod_base = OTHER; note = 2' O-methyl modified nucleoside - 2' O-methyluridine phosphorothioate linkage
  modified_base 21: mod_base = OTHER; note = 2' O-methyl modified nucleoside - 2' O-methyluridine
tatagtactgagataggcttt

SEQ ID NO: 26070 - RNA, 21 nt, synthetic construct
  source 1..21: mol_type = other RNA; note = Description of Artificial Sequence: Synthetic oligonucleotide
  modified_base 1: mod_base = OTHER; note = 2' O-methyl modified nucleoside - 2' O-methyluridine phosphorothioate linkage
  modified_base 2: mod_base = OTHER; note = 2' fluoro-modified nucleoside - 2' fluoroadenosine phosphorothioate linkage
  modified_base 3: mod_base = OTHER; note = 2' O-methyl modified nucleoside - 2' O-methyladenosine
  modified_base 4: mod_base = OTHER; note = 2' fluoro-modified nucleoside - 2' fluorouridine
  modified_base 5: mod_base = OTHER; note = 2' O-methyl modified nucleoside - 2' O-methyladenosine
  modified_base 6: mod_base = OTHER; note = 2' fluoro-modified nucleoside - 2' fluoroguanosine
  modified_base 7: mod_base = OTHER; note = 2' O-methyl modified nucleoside - 2' O-methyluridine
  modified_base 8: mod_base = OTHER; note = 2' fluoro-modified nucleoside - 2' fluoroadenosine
  modified_base 9: mod_base = OTHER; note = 2' O-methyl modified nucleoside - 2' O-methylcytidine
  modified_base 10: mod_base = OTHER; note = 2' fluoro-modified nucleoside - 2' fluorouridine
  modified_base 11: mod_base = OTHER; note = 2' O-methyl modified nucleoside - 2' O-methylguanosine
  modified_base 12: mod_base = OTHER; note = 2' O-methyl modified nucleoside - 2' O-methyladenosine
  modified_base 13: mod_base = OTHER; note = 2' O-methyl modified nucleoside - 2' O-methylguanosine
  modified_base 14: mod_base = OTHER; note = 2' fluoro-modified nucleoside - 2' fluoroadenosine
  modified_base 15: mod_base = OTHER; note = 2' O-methyl modified nucleoside - 2' O-methyluridine
  modified_base 16: mod_base = OTHER; note = 2' fluoro-modified nucleoside - 2' fluoroadenosine
  modified_base 17: mod_base = OTHER; note = 2' O-methyl modified nucleoside - 2' O-methylguanosine
  modified_base 18: mod_base = OTHER; note = 2' fluoro-modified nucleoside - 2' fluoroguanosine
  modified_base 19: mod_base = OTHER; note = 2' O-methyl modified nucleoside - 2' O-methylcytidine phosphorothioate linkage
  modified_base 20: mod_base = OTHER; note = 2' O-methyl modified nucleoside - 2' O-methyluridine phosphorothioate linkage
  modified_base 21: mod_base = OTHER; note = 2' O-methyl modified nucleoside - 2' O-methyluridine
taatagtactgagataggctt

SEQ ID NO: 26071 - RNA, 21 nt, synthetic construct
  source 1..21: mol_type = other RNA; note = Description of Artificial Sequence: Synthetic oligonucleotide
  modified_base 1: mod_base = OTHER; note = 2' O-methyl modified nucleoside - 2' O-methyluridine phosphorothioate linkage
  modified_base 2: mod_base = OTHER; note = 2' fluoro-modified nucleoside - 2' fluoroguanosine phosphorothioate linkage
  modified_base 3: mod_base = OTHER; note = 2' O-methyl modified nucleoside - 2' O-methyladenosine
  modified_base 4: mod_base = OTHER; note = 2' fluoro-modified nucleoside - 2' fluoroadenosine
  modified_base 5: mod_base = OTHER; note = 2' O-methyl modified nucleoside - 2' O-methyladenosine
  modified_base 6: mod_base = OTHER; note = 2' fluoro-modified nucleoside - 2' fluorouridine
  modified_base 7: mod_base = OTHER; note = 2' O-methyl modified nucleoside - 2' O-methyladenosine
  modified_base 8: mod_base = OTHER; note = 2' fluoro-modified nucleoside - 2' fluoroguanosine
  modified_base 9: mod_base = OTHER; note = 2' O-methyl modified nucleoside - 2' O-methyluridine
  modified_base 10: mod_base = OTHER; note = 2' fluoro-modified nucleoside - 2' fluoroadenosine
  modified_base 11: mod_base = OTHER; note = 2' O-methyl modified nucleoside - 2' O-methylcytidine
  modified_base 12: mod_base = OTHER; note = 2' O-methyl modified nucleoside - 2' O-methyluridine
  modified_base 13: mod_base = OTHER; note = 2' O-methyl modified nucleoside - 2' O-methylguanosine
  modified_base 14: mod_base = OTHER; note = 2' fluoro-modified nucleoside - 2' fluoroadenosine
  modified_base 15: mod_base = OTHER; note = 2' O-methyl modified nucleoside - 2' O-methylguanosine
  modified_base 16: mod_base = OTHER; note = 2' fluoro-modified nucleoside - 2' fluoroadenosine
  modified_base 17: mod_base = OTHER; note = 2' O-methyl modified nucleoside - 2' O-methyluridine
  modified_base 18: mod_base = OTHER; note = 2' fluoro-modified nucleoside - 2' fluoroadenosine
  modified_base 19: mod_base = OTHER; note = 2' O-methyl modified nucleoside - 2' O-methylguanosine phosphorothioate linkage
  modified_base 20: mod_base = OTHER; note = 2' O-methyl modified nucleoside - 2' O-methyluridine phosphorothioate linkage
  modified_base 21: mod_base = OTHER; note = 2' O-methyl modified nucleoside - 2' O-methyluridine
tgaaatagtactgagatagtt

SEQ ID NO: 26072 - RNA, 21 nt, synthetic construct
  source 1..21: mol_type = other RNA; note = Description of Artificial Sequence: Synthetic oligonucleotide
  modified_base 1: mod_base = OTHER; note = 2' O-methyl modified nucleoside - 2' O-methyluridine phosphorothioate linkage
  modified_base 2: mod_base = OTHER; note = 2' fluoro-modified nucleoside - 2' fluorouridine phosphorothioate linkage
  modified_base 3: mod_base = OTHER; note = 2' O-methyl modified nucleoside - 2' O-methyladenosine
  modified_base 4: mod_base = OTHER; note = 2' fluoro-modified nucleoside - 2' fluoroguanosine
  modified_base 5: mod_base = OTHER; note = 2' O-methyl modified nucleoside - 2' O-methyladenosine
  modified_base 6: mod_base = OTHER; note = 2' fluoro-modified nucleoside - 2' fluoroadenosine
  modified_base 7: mod_base = OTHER; note = 2' O-methyl modified nucleoside - 2' O-methyladenosine
  modified_base 8: mod_base = OTHER; note = 2' fluoro-modified nucleoside - 2' fluorouridine
  modified_base 9: mod_base = OTHER; note = 2' O-methyl modified nucleoside - 2' O-methyladenosine
  modified_base 10: mod_base = OTHER; note = 2' fluoro-modified nucleoside - 2' fluoroguanosine
  modified_base 11: mod_base = OTHER; note = 2' O-methyl modified nucleoside - 2' O-methyluridine
  modified_base 12: mod_base = OTHER; note = 2' O-methyl modified nucleoside - 2' O-methyladenosine
  modified_base 13: mod_base = OTHER; note = 2' O-methyl modified nucleoside - 2' O-methylcytidine
  modified_base 14: mod_base = OTHER; note = 2' fluoro-modified nucleoside - 2' fluorouridine
  modified_base 15: mod_base = OTHER; note = 2' O-methyl modified nucleoside - 2' O-methylguanosine
  modified_base 16: mod_base = OTHER; note = 2' fluoro-modified nucleoside - 2' fluoroadenosine
  modified_base 17: mod_base = OTHER; note = 2' O-methyl modified nucleoside - 2' O-methylguanosine
  modified_base 18: mod_base = OTHER; note = 2' fluoro-modified nucleoside - 2' fluoroadenosine
  modified_base 19: mod_base = OTHER; note = 2' O-methyl modified nucleoside - 2' O-methyluridine phosphorothioate linkage
  modified_base 20: mod_base = OTHER; note = 2' O-methyl modified nucleoside - 2' O-methyluridine phosphorothioate linkage
  modified_base 21: mod_base = OTHER; note = 2' O-methyl modified nucleoside - 2' O-methyluridine
ttagaaatagtactgagattt

SEQ ID NO: 26073 - RNA, 21 nt, synthetic construct
  source 1..21: mol_type = other RNA; note = Description of Artificial Sequence: Synthetic oligonucleotide
  modified_base 1: mod_base = OTHER; note = 2' O-methyl modified nucleoside - 2' O-methyluridine phosphorothioate linkage
  modified_base 2: mod_base = OTHER; note = 2' fluoro-modified nucleoside - 2' fluorouridine phosphorothioate linkage
  modified_base 3: mod_base = OTHER; note = 2' O-methyl modified nucleoside - 2' O-methyluridine
  modified_base 4: mod_base = OTHER; note = 2' fluoro-modified nucleoside - 2' fluoroadenosine
  modified_base 5: mod_base = OTHER; note = 2' O-methyl modified nucleoside - 2' O-methylguanosine
  modified_base 6: mod_base = OTHER; note = 2' fluoro-modified nucleoside - 2' fluoroadenosine
  modified_base 7: mod_base = OTHER; note = 2' O-methyl modified nucleoside - 2' O-methyladenosine
  modified_base 8: mod_base = OTHER; note = 2' fluoro-modified nucleoside - 2' fluoroadenosine
  modified_base 9: mod_base = OTHER; note = 2' O-methyl modified nucleoside - 2' O-methyluridine
  modified_base 10: mod_base = OTHER; note = 2' fluoro-modified nucleoside - 2' fluoroadenosine
  modified_base 11: mod_base = OTHER; note = 2' O-methyl modified nucleoside - 2' O-methylguanosine
  modified_base 12: mod_base = OTHER; note = 2' O-methyl modified nucleoside - 2' O-methyluridine
  modified_base 13: mod_base = OTHER; note = 2' O-methyl modified nucleoside - 2' O-methyladenosine
  modified_base 14: mod_base = OTHER; note = 2' fluoro-modified nucleoside - 2' fluorocytidine
  modified_base 15: mod_base = OTHER; note = 2' O-methyl modified nucleoside - 2' O-methyluridine
  modified_base 16: mod_base = OTHER; note = 2' fluoro-modified nucleoside - 2' fluoroguanosine
  modified_base 17: mod_base = OTHER; note = 2' O-methyl modified nucleoside - 2' O-methyladenosine
  modified_base 18: mod_base = OTHER; note = 2' fluoro-modified nucleoside - 2' fluoroguanosine
  modified_base 19: mod_base = OTHER; note = 2' O-methyl modified nucleoside - 2' O-methyladenosine phosphorothioate linkage
  modified_base 20: mod_base = OTHER; note = 2' O-methyl modified nucleoside - 2' O-methyluridine phosphorothioate linkage
  modified_base 21: mod_base = OTHER; note = 2' O-methyl modified nucleoside - 2' O-methyluridine
tttagaaatagtactgagatt

SEQ ID NO: 26074 - RNA, 21 nt, synthetic construct
  source 1..21: mol_type = other RNA; note = Description of Artificial Sequence: Synthetic oligonucleotide
  modified_base 1: mod_base = OTHER; note = 2' O-methyl modified nucleoside - 2' O-methyluridine phosphorothioate linkage
  modified_base 2: mod_base = OTHER; note = 2' fluoro-modified nucleoside - 2' fluoroguanosine phosphorothioate linkage
  modified_base 3: mod_base = OTHER; note = 2' O-methyl modified nucleoside - 2' O-methylguanosine
  modified_base 4: mod_base = OTHER; note = 2' fluoro-modified nucleoside - 2' fluorouridine
  modified_base 5: mod_base = OTHER; note = 2' O-methyl modified nucleoside - 2' O-methylcytidine
  modified_base 6: mod_base = OTHER; note = 2' fluoro-modified nucleoside - 2' fluorouridine
  modified_base 7: mod_base = OTHER; note = 2' O-methyl modified nucleoside - 2' O-methyluridine
  modified_base 8: mod_base = OTHER; note = 2' fluoro-modified nucleoside - 2' fluorouridine
  modified_base 9: mod_base = OTHER; note = 2' O-methyl modified nucleoside - 2' O-methyladenosine
  modified_base 10: mod_base = OTHER; note = 2' fluoro-modified nucleoside - 2' fluoroguanosine
  modified_base 11: mod_base = OTHER; note = 2' O-methyl modified nucleoside - 2' O-methyladenosine
  modified_base 12: mod_base = OTHER; note = 2' O-methyl modified nucleoside - 2' O-methyladenosine
  modified_base 13: mod_base = OTHER; note = 2' O-methyl modified nucleoside - 2' O-methyladenosine
  modified_base 14: mod_base = OTHER; note = 2' fluoro-modified nucleoside - 2' fluorouridine
  modified_base 15: mod_base = OTHER; note = 2' O-methyl modified nucleoside - 2' O-methyladenosine
  modified_base 16: mod_base = OTHER; note = 2' fluoro-modified nucleoside - 2' fluoroguanosine
  modified_base 17: mod_base = OTHER; note = 2' O-methyl modified nucleoside - 2' O-methyluridine
  modified_base 18: mod_base = OTHER; note = 2' fluoro-modified nucleoside - 2' fluoroadenosine
  modified_base 19: mod_base = OTHER; note = 2' O-methyl modified nucleoside - 2' O-methylcytidine phosphorothioate linkage
  modified_base 20: mod_base = OTHER; note = 2' O-methyl modified nucleoside - 2' O-methyluridine phosphorothioate linkage
  modified_base 21: mod_base = OTHER; note = 2' O-methyl modified nucleoside - 2' O-methyluridine
tggtctttagaaatagtactt

SEQ ID NO: 26075 - RNA, 21 nt, synthetic construct
  source 1..21: mol_type = other RNA; note = Description of Artificial Sequence: Synthetic oligonucleotide
  modified_base 1: mod_base = OTHER; note = 2' O-methyl modified nucleoside - 2' O-methyluridine phosphorothioate linkage
  modified_base 2: mod_base = OTHER; note = 2' fluoro-modified nucleoside - 2' fluorouridine phosphorothioate linkage
  modified_base 3: mod_base = OTHER; note = 2' O-methyl modified nucleoside - 2' O-methyladenosine
  modified_base 4: mod_base = OTHER; note = 2' fluoro-modified nucleoside - 2' fluoroadenosine
  modified_base 5: mod_base = OTHER; note = 2' O-methyl modified nucleoside - 2' O-methyluridine
  modified_base 6: mod_base = OTHER; note = 2' fluoro-modified nucleoside - 2' fluorocytidine
  modified_base 7: mod_base = OTHER; note = 2' O-methyl modified nucleoside - 2' O-methyladenosine
  modified_base 8: mod_base = OTHER; note = 2' fluoro-modified nucleoside - 2' fluoroguanosine
  modified_base 9: mod_base = OTHER; note = 2' O-methyl modified nucleoside - 2' O-methylguanosine
  modified_base 10: mod_base = OTHER; note = 2' fluoro-modified nucleoside - 2' fluorouridine
  modified_base 11: mod_base = OTHER; note = 2' O-methyl modified nucleoside - 2' O-methylcytidine
  modified_base 12: mod_base = OTHER; note = 2' O-methyl modified nucleoside - 2' O-methyluridine
  modified_base 13: mod_base = OTHER; note = 2' O-methyl modified nucleoside - 2' O-methyluridine
  modified_base 14: mod_base = OTHER; note = 2' fluoro-modified nucleoside - 2' fluorouridine
  modified_base 15: mod_base = OTHER; note = 2' O-methyl modified nucleoside - 2' O-methyladenosine
  modified_base 16: mod_base = OTHER; note = 2' fluoro-modified nucleoside - 2' fluoroguanosine
  modified_base 17: mod_base = OTHER; note = 2' O-methyl modified nucleoside - 2' O-methyladenosine
  modified_base 18: mod_base = OTHER; note = 2' fluoro-modified nucleoside - 2' fluoroadenosine
  modified_base 19: mod_base = OTHER; note = 2' O-methyl modified nucleoside - 2' O-methyladenosine phosphorothioate linkage
  modified_base 20: mod_base = OTHER; note = 2' O-methyl modified nucleoside - 2' O-methyluridine phosphorothioate linkage
  modified_base 21: mod_base = OTHER; note = 2' O-methyl modified nucleoside - 2' O-methyluridine
ttaatcaggtctttagaaatt

SEQ ID NO: 26076 - RNA, 21 nt, synthetic construct
  source 1..21: mol_type = other RNA; note = Description of Artificial Sequence: Synthetic oligonucleotide
  modified_base 1: mod_base = OTHER; note = 2' O-methyl modified nucleoside - 2' O-methyluridine phosphorothioate linkage
  modified_base 2: mod_base = OTHER; note = 2' fluoro-modified nucleoside - 2' fluoroguanosine phosphorothioate linkage
  modified_base 3: mod_base = OTHER; note = 2' O-methyl modified nucleoside - 2' O-methyluridine
  modified_base 4: mod_base = OTHER; note = 2' fluoro-modified nucleoside - 2' fluoroadenosine
  modified_base 5: mod_base = OTHER; note = 2' O-methyl modified nucleoside - 2' O-methyladenosine
  modified_base 6: mod_base = OTHER; note = 2' fluoro-modified nucleoside - 2' fluorouridine
  modified_base 7: mod_base = OTHER; note = 2' O-methyl modified nucleoside - 2' O-methylcytidine
  modified_base 8: mod_base = OTHER; note = 2' fluoro-modified nucleoside - 2' fluoroadenosine
  modified_base 9: mod_base = OTHER; note = 2' O-methyl modified nucleoside - 2' O-methylguanosine
  modified_base 10: mod_base = OTHER; note = 2' fluoro-modified nucleoside - 2' fluoroguanosine
  modified_base 11: mod_base = OTHER; note = 2' O-methyl modified nucleoside - 2' O-methyluridine
  modified_base 12: mod_base = OTHER; note = 2' O-methyl modified nucleoside - 2' O-methylcytidine
  modified_base 13: mod_base = OTHER; note = 2' O-methyl modified nucleoside - 2' O-methyluridine
  modified_base 14: mod_base = OTHER; note = 2' fluoro-modified nucleoside - 2' fluorouridine
  modified_base 15: mod_base = OTHER; note = 2' O-methyl modified nucleoside - 2' O-methyluridine
  modified_base 16: mod_base = OTHER; note = 2' fluoro-modified nucleoside - 2' fluoroadenosine
  modified_base 17: mod_base = OTHER; note = 2' O-methyl modified nucleoside - 2' O-methylguanosine
  modified_base 18: mod_base = OTHER; note = 2' fluoro-modified nucleoside - 2' fluoroadenosine
  modified_base 19: mod_base = OTHER; note = 2' O-methyl modified nucleoside - 2' O-methyladenosine phosphorothioate linkage
  modified_base 20: mod_base = OTHER; note = 2' O-methyl modified nucleoside - 2' O-methyluridine phosphorothioate linkage
  modified_base 21: mod_base = OTHER; note = 2' O-methyl modified nucleoside - 2' O-methyluridine
tgtaatcaggtctttagaatt

SEQ ID NO: 26077 - RNA, 21 nt, synthetic construct
  source 1..21: mol_type = other RNA; note = Description of Artificial Sequence: Synthetic oligonucleotide
  modified_base 1: mod_base = OTHER; note = 2' O-methyl modified nucleoside - 2' O-methyluridine phosphorothioate linkage
  modified_base 2: mod_base = OTHER; note = 2' fluoro-modified nucleoside - 2' fluorocytidine phosphorothioate linkage
  modified_base 3: mod_base = OTHER; note = 2' O-methyl modified nucleoside - 2' O-methyladenosine
  modified_base 4: mod_base = OTHER; note = 2' fluoro-modified nucleoside - 2' fluorouridine
  modified_base 5: mod_base = OTHER; note = 2' O-methyl modified nucleoside - 2' O-methyladenosine
  modified_base 6: mod_base = OTHER; note = 2' fluoro-modified nucleoside - 2' fluorouridine
  modified_base 7: mod_base = OTHER; note = 2' O-methyl modified nucleoside - 2' O-methyladenosine
  modified_base 8: mod_base = OTHER; note = 2' fluoro-modified nucleoside - 2' fluorouridine
  modified_base 9: mod_base = OTHER; note = 2' O-methyl modified nucleoside - 2' O-methylguanosine
  modified_base 10: mod_base = OTHER; note = 2' fluoro-modified nucleoside - 2' fluorouridine
  modified_base 11: mod_base = OTHER; note = 2' O-methyl modified nucleoside - 2' O-methyladenosine
  modified_base 12: mod_base = OTHER; note = 2' O-methyl modified nucleoside - 2' O-methyladenosine
  modified_base 13: mod_base = OTHER; note = 2' O-methyl modified nucleoside - 2' O-methyluridine
  modified_base 14: mod_base = OTHER; note = 2' fluoro-modified nucleoside - 2' fluorocytidine
  modified_base 15: mod_base = OTHER; note = 2' O-methyl modified nucleoside - 2' O-methyladenosine
  modified_base 16: mod_base = OTHER; note = 2' fluoro-modified nucleoside - 2' fluoroguanosine
  modified_base 17: mod_base = OTHER; note = 2' O-methyl modified nucleoside - 2' O-methylguanosine
  modified_base 18: mod_base = OTHER; note = 2' fluoro-modified nucleoside - 2' fluorouridine
  modified_base 19: mod_base = OTHER; note = 2' O-methyl modified nucleoside - 2' O-methylcytidine phosphorothioate linkage
  modified_base 20: mod_base = OTHER; note = 2' O-methyl modified nucleoside - 2' O-methyluridine phosphorothioate linkage
  modified_base 21: mod_base = OTHER; note = 2' O-methyl modified nucleoside - 2' O-methyluridine
tcatatatgtaatcaggtctt

SEQ ID NO: 26078 - RNA, 21 nt, synthetic construct
  source 1..21: mol_type = other RNA; note = Description of Artificial Sequence: Synthetic oligonucleotide
  modified_base 1: mod_base = OTHER; note = 2' O-methyl modified nucleoside - 2' O-methyluridine phosphorothioate linkage
  modified_base 2: mod_base = OTHER; note = 2' fluoro-modified nucleoside - 2' fluoroadenosine phosphorothioate linkage
  modified_base 3: mod_base = OTHER; note = 2' O-methyl modified nucleoside - 2' O-methylcytidine
  modified_base 4: mod_base = OTHER; note = 2' fluoro-modified nucleoside - 2' fluorouridine
  modified_base 5: mod_base = OTHER; note = 2' O-methyl modified nucleoside - 2' O-methylcytidine
  modified_base 6: mod_base = OTHER; note = 2' fluoro-modified nucleoside - 2' fluoroadenosine
  modified_base 7: mod_base = OTHER; note = 2' O-methyl modified nucleoside - 2' O-methyluridine
  modified_base 8: mod_base = OTHER; note = 2' fluoro-modified nucleoside - 2' fluoroadenosine
  modified_base 9: mod_base = OTHER; note = 2' O-methyl modified nucleoside - 2' O-methyluridine
  modified_base 10: mod_base = OTHER; note = 2' fluoro-modified nucleoside - 2' fluoroadenosine
  modified_base 11: mod_base = OTHER; note = 2' O-methyl modified nucleoside - 2' O-methyluridine
  modified_base 12: mod_base = OTHER; note = 2' O-methyl modified nucleoside - 2' O-methylguanosine
  modified_base 13: mod_base = OTHER; note = 2' O-methyl modified nucleoside - 2' O-methyluridine
  modified_base 14: mod_base = OTHER; note = 2' fluoro-modified nucleoside - 2' fluoroadenosine
  modified_base 15: mod_base = OTHER; note = 2' O-methyl modified nucleoside - 2' O-methyladenosine
  modified_base 16: mod_base = OTHER; note = 2' fluoro-modified nucleoside - 2' fluorouridine
  modified_base 17: mod_base = OTHER; note = 2' O-methyl modified nucleoside - 2' O-methylcytidine
  modified_base 18: mod_base = OTHER; note = 2' fluoro-modified nucleoside - 2' fluoroadenosine
  modified_base 19: mod_base = OTHER; note = 2' O-methyl modified nucleoside - 2' O-methylguanosine phosphorothioate linkage
  modified_base 20: mod_base = OTHER; note = 2' O-methyl modified nucleoside - 2' O-methyluridine phosphorothioate linkage
  modified_base 21: mod_base = OTHER; note = 2' O-methyl modified nucleoside - 2' O-methyluridine
tactcatatatgtaatcagtt

SEQ ID NO: 26079 - RNA, 21 nt, synthetic construct
  source 1..21: mol_type = other RNA; note = Description of Artificial Sequence: Synthetic oligonucleotide
  modified_base 1: mod_base = OTHER; note = 2' O-methyl modified nucleoside - 2' O-methyluridine phosphorothioate linkage
  modified_base 2: mod_base = OTHER; note = 2' fluoro-modified nucleoside - 2' fluorocytidine phosphorothioate linkage
  modified_base 3: mod_base = OTHER; note = 2' O-methyl modified nucleoside - 2' O-methyladenosine
  modified_base 4: mod_base = OTHER; note = 2' fluoro-modified nucleoside - 2' fluorocytidine
  modified_base 5: mod_base = OTHER; note = 2' O-methyl modified nucleoside - 2' O-methyluridine
  modified_base 6: mod_base = OTHER; note = 2' fluoro-modified nucleoside - 2' fluorocytidine
  modified_base 7: mod_base = OTHER; note = 2' O-methyl modified nucleoside - 2' O-methyladenosine
  modified_base 8: mod_base = OTHER; note = 2' fluoro-modified nucleoside - 2' fluorouridine
  modified_base 9: mod_base = OTHER; note = 2' O-methyl modified nucleoside - 2' O-methyladenosine
  modified_base 10: mod_base = OTHER; note = 2' fluoro-modified nucleoside - 2' fluorouridine
  modified_base 11: mod_base = OTHER; note = 2' O-methyl modified nucleoside - 2' O-methyladenosine
  modified_base 12: mod_base = OTHER; note = 2' O-methyl modified nucleoside - 2' O-methyluridine
  modified_base 13: mod_base = OTHER; note = 2' O-methyl modified nucleoside - 2' O-methylguanosine
  modified_base 14: mod_base = OTHER; note = 2' fluoro-modified nucleoside - 2' fluorouridine
  modified_base 15: mod_base = OTHER; note = 2' O-methyl modified nucleoside - 2' O-methyladenosine
  modified_base 16: mod_base = OTHER; note = 2' fluoro-modified nucleoside - 2' fluoroadenosine
  modified_base 17: mod_base = OTHER; note = 2' O-methyl modified nucleoside - 2' O-methyluridine
  modified_base 18: mod_base = OTHER; note = 2' fluoro-modified nucleoside - 2' fluorocytidine
  modified_base 19: mod_base = OTHER; note = 2' O-methyl modified nucleoside - 2' O-methyladenosine phosphorothioate linkage
  modified_base 20: mod_base = OTHER; note = 2' O-methyl modified nucleoside - 2' O-methyluridine phosphorothioate linkage
  modified_base 21: mod_base = OTHER; note = 2' O-methyl modified nucleoside - 2' O-methyluridine
tcactcatatatgtaatcatt

SEQ ID NO: 26080 - RNA, 21 nt, synthetic construct
  source 1..21: mol_type = other RNA; note = Description of Artificial Sequence: Synthetic oligonucleotide
  modified_base 1: mod_base = OTHER; note = 2' O-methyl modified nucleoside - 2' O-methyluridine phosphorothioate linkage
  modified_base 2: mod_base = OTHER; note = 2' fluoro-modified nucleoside - 2' fluorouridine phosphorothioate linkage
  modified_base 3: mod_base = OTHER; note = 2' O-methyl modified nucleoside - 2' O-methyluridine
  modified_base 4: mod_base = OTHER; note = 2' fluoro-modified nucleoside - 2' fluorouridine
  modified_base 5: mod_base = OTHER; note = 2' O-methyl modified nucleoside - 2' O-methylguanosine
  modified_base 6: mod_base = OTHER; note = 2' fluoro-modified nucleoside - 2' fluoroguanosine
  modified_base 7: mod_base = OTHER; note = 2' O-methyl modified nucleoside - 2' O-methyluridine
  modified_base 8: mod_base = OTHER; note = 2' fluoro-modified nucleoside - 2' fluorocytidine
  modified_base 9: mod_base = OTHER; note = 2' O-methyl modified nucleoside - 2' O-methylcytidine
  modified_base 10: mod_base = OTHER; note = 2' fluoro-modified nucleoside - 2' fluorocytidine
  modified_base 11: mod_base = OTHER; note = 2' O-methyl modified nucleoside - 2' O-methyladenosine
  modified_base 12: mod_base = OTHER; note = 2' O-methyl modified nucleoside - 2' O-methylcytidine
  modified_base 13: mod_base = OTHER; note = 2' O-methyl modified nucleoside - 2' O-methyluridine
  modified_base 14: mod_base = OTHER; note = 2' fluoro-modified nucleoside - 2' fluorocytidine
  modified_base 15: mod_base = OTHER; note = 2' O-methyl modified nucleoside - 2' O-methyladenosine
  modified_base 16: mod_base = OTHER; note = 2' fluoro-modified nucleoside - 2' fluorouridine
  modified_base 17: mod_base = OTHER; note = 2' O-methyl modified nucleoside - 2' O-methyladenosine
  modified_base 18: mod_base = OTHER; note = 2' fluoro-modified nucleoside - 2' fluorouridine
  modified_base 19: mod_base = OTHER; note = 2' O-methyl modified nucleoside - 2' O-methyladenosine phosphorothioate linkage
  modified_base 20: mod_base = OTHER; note = 2' O-methyl modified nucleoside - 2' O-methyluridine phosphorothioate linkage
  modified_base 21: mod_base = OTHER; note = 2' O-methyl modified nucleoside - 2' O-methyluridine
ttttggtcccactcatatatt

SEQ ID NO: 26081 - RNA, 21 nt, synthetic construct
  source 1..21: mol_type = other RNA; note = Description of Artificial Sequence: Synthetic oligonucleotide
  modified_base 1: mod_base = OTHER; note = 2' O-methyl modified nucleoside - 2' O-methyluridine phosphorothioate linkage
  modified_base 2: mod_base = OTHER; note = 2' fluoro-modified nucleoside - 2' fluorocytidine phosphorothioate linkage
  modified_base 3: mod_base = OTHER; note = 2' O-methyl modified nucleoside - 2' O-methyluridine
  modified_base 4: mod_base = OTHER; note = 2' fluoro-modified nucleoside - 2' fluorouridine
  modified_base 5: mod_base = OTHER; note = 2' O-methyl modified nucleoside - 2' O-methyluridine
  modified_base 6: mod_base = OTHER; note = 2' fluoro-modified nucleoside - 2' fluorouridine
  modified_base 7: mod_base = OTHER; note = 2' O-methyl modified nucleoside - 2' O-methylguanosine
  modified_base 8: mod_base = OTHER; note = 2' fluoro-modified nucleoside - 2' fluoroguanosine
  modified_base 9: mod_base = OTHER; note = 2' O-methyl modified nucleoside - 2' O-methyluridine
  modified_base 10: mod_base = OTHER; note = 2' fluoro-modified nucleoside - 2' fluorocytidine
  modified_base 11: mod_base = OTHER; note = 2' O-methyl modified nucleoside - 2' O-methylcytidine
  modified_base 12: mod_base = OTHER; note = 2' O-methyl modified nucleoside - 2' O-methylcytidine
  modified_base 13: mod_base = OTHER; note = 2' O-methyl modified nucleoside - 2' O-methyladenosine
  modified_base 14: mod_base = OTHER; note = 2' fluoro-modified nucleoside - 2' fluorocytidine
  modified_base 15: mod_base = OTHER; note = 2' O-methyl modified nucleoside - 2' O-methyluridine
  modified_base 16: mod_base = OTHER; note = 2' fluoro-modified nucleoside - 2' fluorocytidine
  modified_base 17: mod_base = OTHER; note = 2' O-methyl modified nucleoside - 2' O-methyladenosine
  modified_base 18: mod_base = OTHER; note = 2' fluoro-modified nucleoside - 2' fluorouridine
  modified_base 19: mod_base = OTHER; note = 2' O-methyl modified nucleoside - 2' O-methyladenosine phosphorothioate linkage
  modified_base 20: mod_base = OTHER; note = 2' O-methyl modified nucleoside - 2' O-methyluridine phosphorothioate linkage
  modified_base 21: mod_base = OTHER; note = 2' O-methyl modified nucleoside - 2' O-methyluridine
tcttttggtcccactcatatt

SEQ ID NO: 26082 - RNA, 21 nt, synthetic construct
  source 1..21: mol_type = other RNA; note = Description of Artificial Sequence: Synthetic oligonucleotide
  modified_base 1: mod_base = OTHER; note = 2' O-methyl modified nucleoside - 2' O-methyluridine phosphorothioate linkage
  modified_base 2: mod_base = OTHER; note = 2' fluoro-modified nucleoside - 2' fluorouridine phosphorothioate linkage
  modified_base 3: mod_base = OTHER; note = 2' O-methyl modified nucleoside - 2' O-methyladenosine
  modified_base 4: mod_base = OTHER; note = 2' fluoro-modified nucleoside - 2' fluorocytidine
  modified_base 5: mod_base = OTHER; note = 2' O-methyl modified nucleoside - 2' O-methyluridine
  modified_base 6: mod_base = OTHER; note = 2' fluoro-modified nucleoside - 2' fluorouridine
  modified_base 7: mod_base = OTHER; note = 2' O-methyl modified nucleoside - 2' O-methyluridine
  modified_base 8: mod_base = OTHER; note = 2' fluoro-modified nucleoside - 2' fluorouridine
  modified_base 9: mod_base = OTHER; note = 2' O-methyl modified nucleoside - 2' O-methylguanosine
  modified_base 10: mod_base = OTHER; note = 2' fluoro-modified nucleoside - 2' fluoroguanosine
  modified_base 11: mod_base = OTHER; note = 2' O-methyl modified nucleoside - 2' O-methyluridine
  modified_base 12: mod_base = OTHER; note = 2' O-methyl modified nucleoside - 2' O-methylcytidine
  modified_base 13: mod_base = OTHER; note = 2' O-methyl modified nucleoside - 2' O-methylcytidine
  modified_base 14: mod_base = OTHER; note = 2' fluoro-modified nucleoside - 2' fluorocytidine
  modified_base 15: mod_base = OTHER; note = 2' O-methyl modified nucleoside - 2' O-methyladenosine
  modified_base 16: mod_base = OTHER; note = 2' fluoro-modified nucleoside - 2' fluorocytidine
  modified_base 17: mod_base = OTHER; note = 2' O-methyl modified nucleoside - 2' O-methyluridine
  modified_base 18: mod_base = OTHER; note = 2' fluoro-modified nucleoside - 2' fluorocytidine
  modified_base 19: mod_base = OTHER; note = 2' O-methyl modified nucleoside - 2' O-methyladenosine phosphorothioate linkage
  modified_base 20: mod_base = OTHER; note = 2' O-methyl modified nucleoside - 2' O-methyluridine phosphorothioate linkage
  modified_base 21: mod_base = OTHER; note = 2' O-methyl modified nucleoside - 2' O-methyluridine
ttacttttggtcccactcatt

SEQ ID NO: 26083 - RNA, 21 nt, synthetic construct
  source 1..21: mol_type = other RNA; note = Description of Artificial Sequence: Synthetic oligonucleotide
  modified_base 1: mod_base = OTHER; note = 2' O-methyl modified nucleoside - 2' O-methyluridine phosphorothioate linkage
  modified_base 2: mod_base = OTHER; note = 2' fluoro-modified nucleoside - 2' fluoroguanosine phosphorothioate linkage
  modified_base 3: mod_base = OTHER; note = 2' O-methyl modified nucleoside - 2' O-methylguanosine
  modified_base 4: mod_base = OTHER; note = 2' fluoro-modified nucleoside - 2' fluorouridine
  modified_base 5: mod_base = OTHER; note = 2' O-methyl modified nucleoside - 2' O-methyladenosine
  modified_base 6: mod_base = OTHER; note = 2' fluoro-modified nucleoside - 2' fluorocytidine
  modified_base 7: mod_base = OTHER; note = 2' O-methyl modified nucleoside - 2' O-methyluridine
  modified_base 8: mod_base = OTHER; note = 2' fluoro-modified nucleoside - 2' fluorouridine
  modified_base 9: mod_base = OTHER; note = 2' O-methyl modified nucleoside - 2' O-methyluridine
  modified_base 10: mod_base = OTHER; note = 2' fluoro-modified nucleoside - 2' fluorouridine
  modified_base 11: mod_base = OTHER; note = 2' O-methyl modified nucleoside - 2' O-methylguanosine
  modified_base 12: mod_base = OTHER; note = 2' O-methyl modified nucleoside - 2' O-methylguanosine
  modified_base 13: mod_base = OTHER; note = 2' O-methyl modified nucleoside - 2' O-methyluridine
  modified_base 14: mod_base = OTHER; note = 2' fluoro-modified nucleoside - 2' fluorocytidine
  modified_base 15: mod_base = OTHER; note = 2' O-methyl modified nucleoside - 2' O-methylcytidine
  modified_base 16: mod_base = OTHER; note = 2' fluoro-modified nucleoside - 2' fluorocytidine
  modified_base 17: mod_base = OTHER; note = 2' O-methyl modified nucleoside - 2' O-methyladenosine
  modified_base 18: mod_base = OTHER; note = 2' fluoro-modified nucleoside - 2' fluorocytidine
  modified_base 19: mod_base = OTHER; note = 2' O-methyl modified nucleoside - 2' O-methyluridine phosphorothioate linkage
  modified_base 20: mod_base = OTHER; note = 2' O-methyl modified nucleoside - 2' O-methyluridine phosphorothioate linkage
  modified_base 21: mod_base = OTHER; note = 2' O-methyl modified nucleoside - 2' O-methyluridine
tggtacttttggtcccacttt

SEQ ID NO: 26084 - RNA, 21 nt, synthetic construct
  source 1..21: mol_type = other RNA; note = Description of Artificial Sequence: Synthetic oligonucleotide
  modified_base 1: mod_base = OTHER; note = 2' O-methyl modified nucleoside - 2' O-methyluridine phosphorothioate linkage
  modified_base 2: mod_base = OTHER; note = 2' fluoro-modified nucleoside - 2' fluorocytidine phosphorothioate linkage
  modified_base 3: mod_base = OTHER; note = 2' O-methyl modified nucleoside - 2' O-methylguanosine
  modified_base 4: mod_base = OTHER; note = 2' fluoro-modified nucleoside - 2' fluoroguanosine
  modified_base 5: mod_base = OTHER; note = 2' O-methyl modified nucleoside - 2' O-methyluridine
  modified_base 6: mod_base = OTHER; note = 2' fluoro-modified nucleoside - 2' fluoroadenosine
  modified_base 7: mod_base = OTHER; note = 2' O-methyl modified nucleoside - 2' O-methylcytidine
  modified_base 8: mod_base = OTHER; note = 2' fluoro-modified nucleoside - 2' fluorouridine
  modified_base 9: mod_base = OTHER; note = 2' O-methyl modified nucleoside - 2' O-methyluridine
  modified_base 10: mod_base = OTHER; note = 2' fluoro-modified nucleoside - 2' fluorouridine
  modified_base 11: mod_base = OTHER; note = 2' O-methyl modified nucleoside - 2' O-methyluridine
  modified_base 12: mod_base = OTHER; note = 2' O-methyl modified nucleoside - 2' O-methylguanosine
  modified_base 13: mod_base = OTHER; note = 2' O-methyl modified nucleoside - 2' O-methylguanosine
  modified_base 14: mod_base = OTHER; note = 2' fluoro-modified nucleoside - 2' fluorouridine
  modified_base 15: mod_base = OTHER; note = 2' O-methyl modified nucleoside - 2' O-methylcytidine
  modified_base 16: mod_base = OTHER; note = 2' fluoro-modified nucleoside - 2' fluorocytidine
  modified_base 17: mod_base = OTHER; note = 2' O-methyl modified nucleoside - 2' O-methylcytidine
  modified_base 18: mod_base = OTHER; note = 2' fluoro-modified nucleoside - 2' fluoroadenosine
  modified_base 19: mod_base = OTHER; note = 2' O-methyl modified nucleoside - 2' O-methylcytidine phosphorothioate linkage
  modified_base 20: mod_base = OTHER; note = 2' O-methyl modified nucleoside - 2' O-methyluridine phosphorothioate linkage
  modified_base 21: mod_base = OTHER; note = 2' O-methyl modified nucleoside - 2' O-methyluridine
tcggtacttttggtcccactt

SEQ ID NO: 26085 - RNA, 21 nt, synthetic construct
  source 1..21: mol_type = other RNA; note = Description of Artificial Sequence: Synthetic oligonucleotide
  modified_base 1: mod_base = OTHER; note = 2' O-methyl modified nucleoside - 2' O-methyluridine phosphorothioate linkage
  modified_base 2: mod_base = OTHER; note = 2' fluoro-modified nucleoside - 2' fluoroadenosine phosphorothioate linkage
  modified_base 3: mod_base = OTHER; note = 2' O-methyl modified nucleoside - 2' O-methylcytidine
  modified_base 4: mod_base = OTHER; note = 2' fluoro-modified nucleoside - 2' fluorouridine
  modified_base 5: mod_base = OTHER; note = 2' O-methyl modified nucleoside - 2' O-methylcytidine
  modified_base 6: mod_base = OTHER; note = 2' fluoro-modified nucleoside - 2' fluoroguanosine
  modified_base 7: mod_base = OTHER; note = 2' O-methyl modified nucleoside - 2' O-methylguanosine
  modified_base 8: mod_base = OTHER; note = 2' fluoro-modified nucleoside - 2' fluorouridine
  modified_base 9: mod_base = OTHER; note = 2' O-methyl modified nucleoside - 2' O-methyladenosine
  modified_base 10: mod_base = OTHER; note = 2' fluoro-modified nucleoside - 2' fluorocytidine
  modified_base 11: mod_base = OTHER; note = 2' O-methyl modified nucleoside - 2' O-methyluridine
  modified_base 12: mod_base = OTHER; note = 2' O-methyl modified nucleoside - 2' O-methyluridine
  modified_base 13: mod_base = OTHER; note = 2' O-methyl modified nucleoside - 2' O-methyluridine
  modified_base 14: mod_base = OTHER; note = 2' fluoro-modified nucleoside - 2' fluorouridine
  modified_base 15: mod_base = OTHER; note = 2' O-methyl modified nucleoside - 2' O-methylguanosine
  modified_base 16: mod_base = OTHER; note = 2' fluoro-modified nucleoside - 2' fluoroguanosine
  modified_base 17: mod_base = OTHER; note = 2' O-methyl modified nucleoside - 2' O-methyluridine
  modified_base 18: mod_base = OTHER; note = 2' fluoro-modified nucleoside - 2' fluorocytidine
  modified_base 19: mod_base = OTHER; note = 2' O-methyl modified nucleoside - 2' O-methylcytidine phosphorothioate linkage
  modified_base 20: mod_base = OTHER; note = 2' O-methyl modified nucleoside - 2' O-methyluridine phosphorothioate linkage
  modified_base 21: mod_base = OTHER; note = 2' O-methyl modified nucleoside - 2' O-methyluridine
tactcggtacttttggtcctt

SEQ ID NO: 26086 - RNA, 21 nt, synthetic construct
  source 1..21: mol_type = other RNA; note = Description of Artificial Sequence: Synthetic oligonucleotide
  modified_base 1: mod_base = OTHER; note = 2' O-methyl modified nucleoside - 2' O-methyluridine phosphorothioate linkage
  modified_base 2: mod_base = OTHER; note = 2' fluoro-modified nucleoside - 2' fluoroadenosine phosphorothioate linkage
  modified_base 3: mod_base = OTHER; note = 2' O-methyl modified nucleoside - 2' O-methyladenosine
  modified_base 4: mod_base = OTHER; note = 2' fluoro-modified nucleoside - 2' fluorocytidine
  modified_base 5: mod_base = OTHER; note = 2' O-methyl modified nucleoside - 2' O-methyluridine
  modified_base 6: mod_base = OTHER; note = 2' fluoro-modified nucleoside - 2' fluorocytidine
  modified_base 7: mod_base = OTHER; note = 2' O-methyl modified nucleoside - 2' O-methylguanosine
  modified_base 8: mod_base = OTHER; note = 2' fluoro-modified nucleoside - 2' fluoroguanosine
  modified_base 9: mod_base = OTHER; note = 2' O-methyl modified nucleoside - 2' O-methyluridine
  modified_base 10: mod_base = OTHER; note = 2' fluoro-modified nucleoside - 2' fluoroadenosine
  modified_base 11: mod_base = OTHER; note = 2' O-methyl modified nucleoside - 2' O-methylcytidine
  modified_base 12: mod_base = OTHER; note = 2' O-methyl modified nucleoside - 2' O-methyluridine
  modified_base 13: mod_base = OTHER; note = 2' O-methyl modified nucleoside - 2' O-methyluridine
  modified_base 14: mod_base = OTHER; note = 2' fluoro-modified nucleoside - 2' fluorouridine
  modified_base 15: mod_base = OTHER; note = 2' O-methyl modified nucleoside - 2' O-methyluridine
  modified_base 16: mod_base = OTHER; note = 2' fluoro-modified nucleoside - 2' fluoroguanosine
  modified_base 17: mod_base = OTHER; note = 2' O-methyl modified nucleoside - 2' O-methylguanosine
  modified_base 18: mod_base = OTHER; note = 2' fluoro-modified nucleoside - 2' fluorouridine
  modified_base 19: mod_base = OTHER; note = 2' O-methyl modified nucleoside - 2' O-methylcytidine phosphorothioate linkage
  modified_base 20: mod_base = OTHER; note = 2' O-methyl modified nucleoside - 2' O-methyluridine phosphorothioate linkage
  modified_base 21: mod_base = OTHER; note = 2' O-methyl modified nucleoside - 2' O-methyluridine
taactcggtacttttggtctt

SEQ ID NO: 26087 - RNA, 21 nt, synthetic construct
  source 1..21: mol_type = other RNA; note = Description of Artificial Sequence: Synthetic oligonucleotide
  modified_base 1: mod_base = OTHER; note = 2' O-methyl modified nucleoside - 2' O-methyluridine phosphorothioate linkage
  modified_base 2: mod_base = OTHER; note = 2' fluoro-modified nucleoside - 2' fluorouridine phosphorothioate linkage
  modified_base 3: mod_base = OTHER; note = 2' O-methyl modified nucleoside - 2' O-methyluridine
  modified_base 4: mod_base = OTHER; note = 2' fluoro-modified nucleoside - 2' fluoroguanosine
  modified_base 5: mod_base = OTHER; note = 2' O-methyl modified nucleoside - 2' O-methyladenosine
  modified_base 6: mod_base = OTHER; note = 2' fluoro-modified nucleoside - 2' fluoroadenosine
  modified_base 7: mod_base = OTHER; note = 2' O-methyl modified nucleoside - 2' O-methylcytidine
  modified_base 8: mod_base = OTHER; note = 2' fluoro-modified nucleoside - 2' fluorouridine
  modified_base 9: mod_base = OTHER; note = 2' O-methyl modified nucleoside - 2' O-methylcytidine
  modified_base 10: mod_base = OTHER; note = 2' fluoro-modified nucleoside - 2' fluoroguanosine
  modified_base 11: mod_base = OTHER; note = 2' O-methyl modified nucleoside - 2' O-methylguanosine
  modified_base 12: mod_base = OTHER; note = 2' O-methyl modified nucleoside - 2' O-methyluridine
  modified_base 13: mod_base = OTHER; note = 2' O-methyl modified nucleoside - 2' O-methyladenosine
  modified_base 14: mod_base = OTHER; note = 2' fluoro-modified nucleoside - 2' fluorocytidine
  modified_base 15: mod_base = OTHER; note = 2' O-methyl modified nucleoside - 2' O-methyluridine
  modified_base 16: mod_base = OTHER; note = 2' fluoro-modified nucleoside - 2' fluorouridine
  modified_base 17: mod_base = OTHER; note = 2' O-methyl modified nucleoside - 2' O-methyluridine
  modified_base 18: mod_base = OTHER; note = 2' fluoro-modified nucleoside - 2' fluorouridine
  modified_base 19: mod_base = OTHER; note = 2' O-methyl modified nucleoside - 2' O-methylguanosine phosphorothioate linkage
  modified_base 20: mod_base = OTHER; note = 2' O-methyl modified nucleoside - 2' O-methyluridine phosphorothioate linkage
  modified_base 21: mod_base = OTHER; note = 2' O-methyl modified nucleoside - 2' O-methyluridine
tttgaactcggtacttttgtt

SEQ ID NO: 26088 - RNA, 21 nt, synthetic construct
  source 1..21: mol_type = other RNA; note = Description of Artificial Sequence: Synthetic oligonucleotide
  modified_base 1: mod_base = OTHER; note = 2' O-methyl modified nucleoside - 2' O-methyluridine phosphorothioate linkage
  modified_base 2: mod_base = OTHER; note = 2' fluoro-modified nucleoside - 2' fluorocytidine phosphorothioate linkage
  modified_base 3: mod_base = OTHER; note = 2' O-methyl modified nucleoside - 2' O-methylguanosine
  modified_base 4: mod_base = OTHER; note = 2' fluoro-modified nucleoside - 2' fluoroguanosine
  modified_base 5: mod_base = OTHER; note = 2' O-methyl modified nucleoside - 2' O-methyluridine
  modified_base 6: mod_base = OTHER; note = 2' fluoro-modified nucleoside - 2' fluoroguanosine
  modified_base 7: mod_base = OTHER; note = 2' O-methyl modified nucleoside - 2' O-methyluridine
  modified_base 8: mod_base = OTHER; note = 2' fluoro-modified nucleoside - 2' fluorouridine
  modified_base 9: mod_base = OTHER; note = 2' O-methyl modified nucleoside - 2' O-methylguanosine
  modified_base 10: mod_base = OTHER; note = 2' fluoro-modified nucleoside - 2' fluorouridine
  modified_base 11: mod_base = OTHER; note = 2' O-methyl modified nucleoside - 2' O-methyluridine
  modified_base 12: mod_base = OTHER; note = 2' O-methyl modified nucleoside - 2' O-methylguanosine
  modified_base 13: mod_base = OTHER; note = 2' O-methyl modified nucleoside - 2' O-methyladenosine
  modified_base 14: mod_base = OTHER; note = 2' fluoro-modified nucleoside - 2' fluoroadenosine
  modified_base 15: mod_base = OTHER; note = 2' O-methyl modified nucleoside - 2' O-methylcytidine
  modified_base 16: mod_base = OTHER; note = 2' fluoro-modified nucleoside - 2' fluorouridine
  modified_base 17: mod_base = OTHER; note = 2' O-methyl modified nucleoside - 2' O-methylcytidine
  modified_base 18: mod_base = OTHER; note = 2' fluoro-modified nucleoside - 2' fluoroguanosine
  modified_base 19: mod_base = OTHER; note = 2' O-methyl modified nucleoside - 2' O-methylguanosine phosphorothioate linkage
  modified_base 20: mod_base = OTHER; note = 2' O-methyl modified nucleoside - 2' O-methyluridine phosphorothioate linkage
  modified_base 21: mod_base = OTHER; note = 2' O-methyl modified nucleoside - 2' O-methyluridine
tcggtgttgttgaactcggtt

SEQ ID NO: 26089 - RNA, 21 nt, synthetic construct
  source 1..21: mol_type = other RNA; note = Description of Artificial Sequence: Synthetic oligonucleotide
  modified_base 1: mod_base = OTHER; note = 2' O-methyl modified nucleoside - 2' O-methyluridine phosphorothioate linkage
  modified_base 2: mod_base = OTHER; note = 2' fluoro-modified nucleoside - 2' fluoroadenosine phosphorothioate linkage
  modified_base 3: mod_base = OTHER; note = 2' O-methyl modified nucleoside - 2' O-methylcytidine
  modified_base 4: mod_base = OTHER; note = 2' fluoro-modified nucleoside - 2' fluoroadenosine
  modified_base 5: mod_base = OTHER; note = 2' O-methyl modified nucleoside - 2' O-methyladenosine
  modified_base 6: mod_base = OTHER; note = 2' fluoro-modified nucleoside - 2' fluoroguanosine
  modified_base 7: mod_base = OTHER; note = 2' O-methyl modified nucleoside - 2' O-methyladenosine
  modified_base 8: mod_base = OTHER; note = 2' fluoro-modified nucleoside - 2' fluoroguanosine
  modified_base 9: mod_base = OTHER; note = 2' O-methyl modified nucleoside - 2' O-methyladenosine
  modified_base 10: mod_base = OTHER; note = 2' fluoro-modified nucleoside - 2' fluorocytidine
  modified_base 11: mod_base = OTHER; note = 2' O-methyl modified nucleoside - 2' O-methylguanosine
  modified_base 12: mod_base = OTHER; note = 2' O-methyl modified nucleoside - 2' O-methylguanosine
  modified_base 13: mod_base = OTHER; note = 2' O-methyl modified nucleoside - 2' O-methyluridine
  modified_base 14: mod_base = OTHER; note = 2' fluoro-modified nucleoside - 2' fluoroguanosine
  modified_base 15: mod_base = OTHER; note = 2' O-methyl modified nucleoside - 2' O-methyluridine
  modified_base 16: mod_base = OTHER; note = 2' fluoro-modified nucleoside - 2' fluorouridine
  modified_base 17: mod_base = OTHER; note = 2' O-methyl modified nucleoside - 2' O-methylguanosine
  modified_base 18: mod_base = OTHER; note = 2' fluoro-modified nucleoside - 2' fluorouridine
  modified_base 19: mod_base = OTHER; note = 2' O-methyl modified nucleoside - 2' O-methyluridine phosphorothioate linkage
  modified_base 20: mod_base = OTHER; note = 2' O-methyl modified nucleoside - 2' O-methyluridine phosphorothioate linkage
  modified_base 21: mod_base = OTHER; note = 2' O-methyl modified nucleoside - 2' O-methyluridine
tacaagagacggtgttgtttt

SEQ ID NO: 26090 - RNA, 21 nt, synthetic construct
  source 1..21: mol_type = other RNA; note = Description of Artificial Sequence: Synthetic oligonucleotide
  modified_base 1: mod_base = OTHER; note = 2' O-methyl modified nucleoside - 2' O-methyluridine phosphorothioate linkage
  modified_base 2: mod_base = OTHER; note = 2' fluoro-modified nucleoside - 2' fluorouridine phosphorothioate linkage
  modified_base 3: mod_base = OTHER; note = 2' O-methyl modified nucleoside - 2' O-methyladenosine
  modified_base 4: mod_base = OTHER; note = 2' fluoro-modified nucleoside - 2' fluorocytidine
  modified_base 5: mod_base = OTHER; note = 2' O-methyl modified nucleoside - 2' O-methyladenosine
  modified_base 6: mod_base = OTHER; note = 2' fluoro-modified nucleoside - 2' fluoroadenosine
  modified_base 7: mod_base = OTHER; note = 2' O-methyl modified nucleoside - 2' O-methylguanosine
  modified_base 8: mod_base = OTHER; note = 2' fluoro-modified nucleoside - 2' fluoroadenosine
  modified_base 9: mod_base = OTHER; note = 2' O-methyl modified nucleoside - 2' O-methylguanosine
  modified_base 10: mod_base = OTHER; note = 2' fluoro-modified nucleoside - 2' fluoroadenosine
  modified_base 11: mod_base = OTHER; note = 2' O-methyl modified nucleoside - 2' O-methylcytidine
  modified_base 12: mod_base = OTHER; note = 2' O-methyl modified nucleoside - 2' O-methylguanosine
  modified_base 13: mod_base = OTHER; note = 2' O-methyl modified nucleoside - 2' O-methylguanosine
  modified_base 14: mod_base = OTHER; note = 2' fluoro-modified nucleoside - 2' fluorouridine
  modified_base 15: mod_base = OTHER; note = 2' O-methyl modified nucleoside - 2' O-methylguanosine
  modified_base 16: mod_base = OTHER; note = 2' fluoro-modified nucleoside - 2' fluorouridine
  modified_base 17: mod_base = OTHER; note = 2' O-methyl modified nucleoside - 2' O-methyluridine
  modified_base 18: mod_base = OTHER; note = 2' fluoro-modified nucleoside - 2' fluoroguanosine
  modified_base 19: mod_base = OTHER; note = 2' O-methyl modified nucleoside - 2' O-methyluridine phosphorothioate linkage
  modified_base 20: mod_base = OTHER; note = 2' O-methyl modified nucleoside - 2' O-methyluridine phosphorothioate linkage
  modified_base 21: mod_base = OTHER; note = 2' O-methyl modified nucleoside - 2' O-methyluridine
ttacaagagacggtgttgttt

SEQ ID NO: 26091 - RNA, 21 nt, synthetic construct
  source 1..21: mol_type = other RNA; note = Description of Artificial Sequence: Synthetic oligonucleotide
  modified_base 1: mod_base = OTHER; note = 2' O-methyl modified nucleoside - 2' O-methyluridine phosphorothioate linkage
  modified_base 2: mod_base = OTHER; note = 2' fluoro-modified nucleoside - 2' fluorouridine phosphorothioate linkage
  modified_base 3: mod_base = OTHER; note = 2' O-methyl modified nucleoside - 2' O-methyluridine
  modified_base 4: mod_base = OTHER; note = 2' fluoro-modified nucleoside - 2' fluoroguanosine
  modified_base 5: mod_base = OTHER; note = 2' O-methyl modified nucleoside - 2' O-methylcytidine
  modified_base 6: mod_base = OTHER; note = 2' fluoro-modified nucleoside - 2' fluorouridine
  modified_base 7: mod_base = OTHER; note = 2' O-methyl modified nucleoside - 2' O-methyladenosine
  modified_base 8: mod_base = OTHER; note = 2' fluoro-modified nucleoside - 2' fluorocytidine
  modified_base 9: mod_base = OTHER; note = 2' O-methyl modified nucleoside - 2' O-methyladenosine
  modified_base 10: mod_base = OTHER; note = 2' fluoro-modified nucleoside - 2' fluoroadenosine
  modified_base 11: mod_base = OTHER; note = 2' O-methyl modified nucleoside - 2' O-methylguanosine
  modified_base 12: mod_base = OTHER; note = 2' O-methyl modified nucleoside - 2' O-methyladenosine
  modified_base 13: mod_base = OTHER; note = 2' O-methyl modified nucleoside - 2' O-methylguanosine
  modified_base 14: mod_base = OTHER; note = 2' fluoro-modified nucleoside - 2' fluoroadenosine
  modified_base 15: mod_base = OTHER; note = 2' O-methyl modified nucleoside - 2' O-methylcytidine
  modified_base 16: mod_base = OTHER; note = 2' fluoro-modified nucleoside - 2' fluoroguanosine
  modified_base 17: mod_base = OTHER; note = 2' O-methyl modified nucleoside - 2' O-methylguanosine
  modified_base 18: mod_base = OTHER; note = 2' fluoro-modified nucleoside - 2' fluorouridine
  modified_base 19: mod_base = OTHER; note = 2' O-methyl modified nucleoside - 2' O-methylguanosine phosphorothioate linkage
  modified_base 20: mod_base = OTHER; note = 2' O-methyl modified nucleoside - 2' O-methyluridine phosphorothioate linkage
  modified_base 21: mod_base = OTHER; note = 2' O-methyl modified nucleoside - 2' O-methyluridine
tttgctacaagagacggtgtt

SEQ ID NO: 26092 - RNA, 21 nt, synthetic construct
  source 1..21: mol_type = other RNA; note = Description of Artificial Sequence: Synthetic oligonucleotide
  modified_base 1: mod_base = OTHER; note = 2' O-methyl modified nucleoside - 2' O-methyluridine phosphorothioate linkage
  modified_base 2: mod_base = OTHER; note = 2' fluoro-modified nucleoside - 2' fluorocytidine phosphorothioate linkage
  modified_base 3: mod_base = OTHER; note = 2' O-methyl modified nucleoside - 2' O-methylguanosine
  modified_base 4: mod_base = OTHER; note = 2' fluoro-modified nucleoside - 2' fluoroadenosine
  modified_base 5: mod_base = OTHER; note = 2' O-methyl modified nucleoside - 2' O-methyluridine
  modified_base 6: mod_base = OTHER; note = 2' fluoro-modified nucleoside - 2' fluorouridine
  modified_base 7: mod_base = OTHER; note = 2' O-methyl modified nucleoside - 2' O-methylguanosine
  modified_base 8: mod_base = OTHER; note = 2' fluoro-modified nucleoside - 2' fluorocytidine
  modified_base 9: mod_base = OTHER; note = 2' O-methyl modified nucleoside - 2' O-methyluridine
  modified_base 10: mod_base = OTHER; note = 2' fluoro-modified nucleoside - 2' fluoroadenosine
  modified_base 11: mod_base = OTHER; note = 2' O-methyl modified nucleoside - 2' O-methylcytidine
  modified_base 12: mod_base = OTHER; note = 2' O-methyl modified nucleoside - 2' O-methyladenosine
  modified_base 13: mod_base = OTHER; note = 2' O-methyl modified nucleoside - 2' O-methyladenosine
  modified_base 14: mod_base = OTHER; note = 2' fluoro-modified nucleoside - 2' fluoroguanosine
  modified_base 15: mod_base = OTHER; note = 2' O-methyl modified nucleoside - 2' O-methyladenosine
  modified_base 16: mod_base = OTHER; note = 2' fluoro-modified nucleoside - 2' fluoroguanosine
  modified_base 17: mod_base = OTHER; note = 2' O-methyl modified nucleoside - 2' O-methyladenosine
  modified_base 18: mod_base = OTHER; note = 2' fluoro-modified nucleoside - 2' fluorocytidine
  modified_base 19: mod_base = OTHER; note = 2' O-methyl modified nucleoside - 2' O-methylguanosine phosphorothioate linkage
  modified_base 20: mod_base = OTHER; note = 2' O-methyl modified nucleoside - 2' O-methyluridine phosphorothioate linkage
  modified_base 21: mod_base = OTHER; note = 2' O-methyl modified nucleoside - 2' O-methyluridine
tcgattgctacaagagacgtt

SEQ ID NO: 26093 - RNA, 21 nt, synthetic construct
  source 1..21: mol_type = other RNA; note = Description of Artificial Sequence: Synthetic oligonucleotide
  modified_base 1: mod_base = OTHER; note = 2' O-methyl modified nucleoside - 2' O-methyluridine phosphorothioate linkage
  modified_base 2: mod_base = OTHER; note = 2' fluoro-modified nucleoside - 2' fluorouridine phosphorothioate linkage
  modified_base 3: mod_base = OTHER; note = 2' O-methyl modified nucleoside - 2' O-methylguanosine
  modified_base 4: mod_base = OTHER; note = 2' fluoro-modified nucleoside - 2' fluoroguanosine
  modified_base 5: mod_base = OTHER; note = 2' O-methyl modified nucleoside - 2' O-methylcytidine
  modified_base 6: mod_base = OTHER; note = 2' fluoro-modified nucleoside - 2' fluorocytidine
  modified_base 7: mod_base = OTHER; note = 2' O-methyl modified nucleoside - 2' O-methylguanosine
  modified_base 8: mod_base = OTHER; note = 2' fluoro-modified nucleoside - 2' fluoroadenosine
  modified_base 9: mod_base = OTHER; note = 2' O-methyl modified nucleoside - 2' O-methyluridine
  modified_base 10: mod_base = OTHER; note = 2' fluoro-modified nucleoside - 2' fluorouridine
  modified_base 11: mod_base = OTHER; note = 2' O-methyl modified nucleoside - 2' O-methylguanosine
  modified_base 12: mod_base = OTHER; note = 2' O-methyl modified nucleoside - 2' O-methylcytidine
  modified_base 13: mod_base = OTHER; note = 2' O-methyl modified nucleoside - 2' O-methyluridine
  modified_base 14: mod_base = OTHER; note = 2' fluoro-modified nucleoside - 2' fluoroadenosine
  modified_base 15: mod_base = OTHER; note = 2' O-methyl modified nucleoside - 2' O-methylcytidine
  modified_base 16: mod_base = OTHER; note = 2' fluoro-modified nucleoside - 2' fluoroadenosine
  modified_base 17: mod_base = OTHER; note = 2' O-methyl modified nucleoside - 2' O-methyladenosine
  modified_base 18: mod_base = OTHER; note = 2' fluoro-modified nucleoside - 2' fluoroguanosine
  modified_base 19: mod_base = OTHER; note = 2' O-methyl modified nucleoside - 2' O-methyladenosine phosphorothioate linkage
  modified_base 20: mod_base = OTHER; note = 2' O-methyl modified nucleoside - 2' O-methyluridine phosphorothioate linkage
  modified_base 21: mod_base = OTHER; note = 2' O-methyl modified nucleoside - 2' O-methyluridine
ttggccgattgctacaagatt

SEQ ID NO: 26094 - RNA, 21 nt, synthetic construct
  source 1..21: mol_type = other RNA; note = Description of Artificial Sequence: Synthetic oligonucleotide
  modified_base 1: mod_base = OTHER; note = 2' O-methyl modified nucleoside - 2' O-methyluridine phosphorothioate linkage
  modified_base 2: mod_base = OTHER; note = 2' fluoro-modified nucleoside - 2' fluorocytidine phosphorothioate linkage
  modified_base 3: mod_base = OTHER; note = 2' O-methyl modified nucleoside - 2' O-methyladenosine
  modified_base 4: mod_base = OTHER; note = 2' fluoro-modified nucleoside - 2' fluoroadenosine
  modified_base 5: mod_base = OTHER; note = 2' O-methyl modified nucleoside - 2' O-methyluridine
  modified_base 6: mod_base = OTHER; note = 2' fluoro-modified nucleoside - 2' fluoroguanosine
  modified_base 7: mod_base = OTHER; note = 2' O-methyl modified nucleoside - 2' O-methyluridine
  modified_base 8: mod_base = OTHER; note = 2' fluoro-modified nucleoside - 2' fluoroguanosine
  modified_base 9: mod_base = OTHER; note = 2' O-methyl modified nucleoside - 2' O-methylguanosine
  modified_base 10: mod_base = OTHER; note = 2' fluoro-modified nucleoside - 2' fluorocytidine
  modified_base 11: mod_base = OTHER; note = 2' O-methyl modified nucleoside - 2' O-methylcytidine
  modified_base 12: mod_base = OTHER; note = 2' O-methyl modified nucleoside - 2' O-methylguanosine
  modified_base 13: mod_base = OTHER; note = 2' O-methyl modified nucleoside - 2' O-methyladenosine
  modified_base 14: mod_base = OTHER; note = 2' fluoro-modified nucleoside - 2' fluorouridine
  modified_base 15: mod_base = OTHER; note = 2' O-methyl modified nucleoside - 2' O-methyluridine
  modified_base 16: mod_base = OTHER; note = 2' fluoro-modified nucleoside - 2' fluoroguanosine
  modified_base 17: mod_base = OTHER; note = 2' O-methyl modified nucleoside - 2' O-methylcytidine
  modified_base 18: mod_base = OTHER; note = 2' fluoro-modified nucleoside - 2' fluorouridine
  modified_base 19: mod_base = OTHER; note = 2' O-methyl modified nucleoside - 2' O-methyladenosine phosphorothioate linkage
  modified_base 20: mod_base = OTHER; note = 2' O-methyl modified nucleoside - 2' O-methyluridine phosphorothioate linkage
  modified_base 21: mod_base = OTHER; note = 2' O-methyl modified nucleoside - 2' O-methyluridine
tcaatgtggccgattgctatt

SEQ ID NO: 26095 - RNA, 21 nt, synthetic construct
  source 1..21: mol_type = other RNA; note = Description of Artificial Sequence: Synthetic oligonucleotide
  modified_base 1: mod_base = OTHER; note = 2' O-methyl modified nucleoside - 2' O-methyluridine phosphorothioate linkage
  modified_base 2: mod_base = OTHER; note = 2' fluoro-modified nucleoside - 2' fluoroguanosine phosphorothioate linkage
  modified_base 3: mod_base = OTHER; note = 2' O-methyl modified nucleoside - 2' O-methylcytidine
  modified_base 4: mod_base = OTHER; note = 2' fluoro-modified nucleoside - 2' fluoroadenosine
  modified_base 5: mod_base = OTHER; note = 2' O-methyl modified nucleoside - 2' O-methyladenosine
  modified_base 6: mod_base = OTHER; note = 2' fluoro-modified nucleoside - 2' fluorouridine
  modified_base 7: mod_base = OTHER; note = 2' O-methyl modified nucleoside - 2' O-methylguanosine
  modified_base 8: mod_base = OTHER; note = 2' fluoro-modified nucleoside - 2' fluorouridine
  modified_base 9: mod_base = OTHER; note = 2' O-methyl modified nucleoside - 2' O-methylguanosine
  modified_base 10: mod_base = OTHER; note = 2' fluoro-modified nucleoside - 2' fluoroguanosine
  modified_base 11: mod_base = OTHER; note = 2' O-methyl modified nucleoside - 2' O-methylcytidine
  modified_base 12: mod_base = OTHER; note = 2' O-methyl modified nucleoside - 2' O-methylcytidine
  modified_base 13: mod_base = OTHER; note = 2' O-methyl modified nucleoside - 2' O-methylguanosine
  modified_base 14: mod_base = OTHER; note = 2' fluoro-modified nucleoside - 2' fluoroadenosine
  modified_base 15: mod_base = OTHER; note = 2' O-methyl modified nucleoside - 2' O-methyluridine
  modified_base 16: mod_base = OTHER; note = 2' fluoro-modified nucleoside - 2' fluorouridine
  modified_base 17: mod_base = OTHER; note = 2' O-methyl modified nucleoside - 2' O-methylguanosine
  modified_base 18: mod_base = OTHER; note = 2' fluoro-modified nucleoside - 2' fluorocytidine
  modified_base 19: mod_base = OTHER; note = 2' O-methyl modified nucleoside - 2' O-methyluridine phosphorothioate linkage
  modified_base 20: mod_base = OTHER; note = 2' O-methyl modified nucleoside - 2' O-methyluridine phosphorothioate linkage
  modified_base 21: mod_base = OTHER; note = 2' O-methyl modified nucleoside - 2' O-methyluridine
tgcaatgtggccgattgcttt

SEQ ID NO: 26096 - RNA, 21 nt, synthetic construct
  source 1..21: mol_type = other RNA; note = Description of Artificial Sequence: Synthetic oligonucleotide
  modified_base 1: mod_base = OTHER; note = 2' O-methyl modified nucleoside - 2' O-methyluridine phosphorothioate linkage
  modified_base 2: mod_base = OTHER; note = 2' fluoro-modified nucleoside - 2' fluoroguanosine phosphorothioate linkage
  modified_base 3: mod_base = OTHER; note = 2' O-methyl modified nucleoside - 2' O-methylguanosine
  modified_base 4: mod_base = OTHER; note = 2' fluoro-modified nucleoside - 2' fluorocytidine
  modified_base 5: mod_base = OTHER; note = 2' O-methyl modified nucleoside - 2' O-methyladenosine
  modified_base 6: mod_base = OTHER; note = 2' fluoro-modified nucleoside - 2' fluoroadenosine
  modified_base 7: mod_base = OTHER; note = 2' O-methyl modified nucleoside - 2' O-methyluridine
  modified_base 8: mod_base = OTHER; note = 2' fluoro-modified nucleoside - 2' fluoroguanosine
  modified_base 9: mod_base = OTHER; note = 2' O-methyl modified nucleoside - 2' O-methyluridine
  modified_base 10: mod_base = OTHER; note = 2' fluoro-modified nucleoside - 2' fluoroguanosine
  modified_base 11: mod_base = OTHER; note = 2' O-methyl modified nucleoside - 2' O-methylguanosine
  modified_base 12: mod_base = OTHER; note = 2' O-methyl modified nucleoside - 2' O-methylcytidine
  modified_base 13: mod_base = OTHER; note = 2' O-methyl modified nucleoside - 2' O-methylcytidine
  modified_base 14: mod_base = OTHER; note = 2' fluoro-modified nucleoside - 2' fluoroguanosine
  modified_base 15: mod_base = OTHER; note = 2' O-methyl modified nucleoside - 2' O-methyladenosine
  modified_base 16: mod_base = OTHER; note = 2' fluoro-modified nucleoside - 2' fluorouridine
  modified_base 17: mod_base = OTHER; note = 2' O-methyl modified nucleoside - 2' O-methyluridine
  modified_base 18: mod_base = OTHER; note = 2' fluoro-modified nucleoside - 2' fluoroguanosine
  modified_base 19: mod_base = OTHER; note = 2' O-methyl modified nucleoside - 2' O-methylcytidine phosphorothioate linkage
  modified_base 20: mod_base = OTHER; note = 2' O-methyl modified nucleoside - 2' O-methyluridine phosphorothioate linkage
  modified_base 21: mod_base = OTHER; note = 2' O-methyl modified nucleoside - 2' O-methyluridine
tggcaatgtggccgattgctt

SEQ ID NO: 26097 - RNA, 21 nt, synthetic construct
  source 1..21: mol_type = other RNA; note = Description of Artificial Sequence: Synthetic oligonucleotide
  modified_base 1: mod_base = OTHER; note = 2' O-methyl modified nucleoside - 2' O-methyluridine phosphorothioate linkage
  modified_base 2: mod_base = OTHER; note = 2' fluoro-modified nucleoside - 2' fluoroadenosine phosphorothioate linkage
  modified_base 3: mod_base = OTHER; note = 2' O-methyl modified nucleoside - 2' O-methylguanosine
  modified_base 4: mod_base = OTHER; note = 2' fluoro-modified nucleoside - 2' fluoroguanosine
  modified_base 5: mod_base = OTHER; note = 2' O-methyl modified nucleoside - 2' O-methylcytidine
  modified_base 6: mod_base = OTHER; note = 2' fluoro-modified nucleoside - 2' fluoroadenosine
  modified_base 7: mod_base = OTHER; note = 2' O-methyl modified nucleoside - 2' O-methyladenosine
  modified_base 8: mod_base = OTHER; note = 2' fluoro-modified nucleoside - 2' fluorouridine
  modified_base 9: mod_base = OTHER; note = 2' O-methyl modified nucleoside - 2' O-methylguanosine
  modified_base 10: mod_base = OTHER; note = 2' fluoro-modified nucleoside - 2' fluorouridine
  modified_base 11: mod_base = OTHER; note = 2' O-methyl modified nucleoside - 2' O-methylguanosine
  modified_base 12: mod_base = OTHER; note = 2' O-methyl modified nucleoside - 2' O-methylguanosine
  modified_base 13: mod_base = OTHER; note = 2' O-methyl modified nucleoside - 2' O-methylcytidine
  modified_base 14: mod_base = OTHER; note = 2' fluoro-modified nucleoside - 2' fluorocytidine
  modified_base 15: mod_base = OTHER; note = 2' O-methyl modified nucleoside - 2' O-methylguanosine
  modified_base 16: mod_base = OTHER; note = 2' fluoro-modified nucleoside - 2' fluoroadenosine
  modified_base 17: mod_base = OTHER; note = 2' O-methyl modified nucleoside - 2' O-methyluridine
  modified_base 18: mod_base = OTHER; note = 2' fluoro-modified nucleoside - 2' fluorouridine
  modified_base 19: mod_base = OTHER; note = 2' O-methyl modified nucleoside - 2' O-methylguanosine phosphorothioate linkage
  modified_base 20: mod_base = OTHER; note = 2' O-methyl modified nucleoside - 2' O-methyluridine phosphorothioate linkage
  modified_base 21: mod_base = OTHER; note = 2' O-methyl modified nucleoside - 2' O-methyluridine
taggcaatgtggccgattgtt

SEQ ID NO: 26098 - RNA, 21 nt, synthetic construct
  source 1..21: mol_type = other RNA; note = Description of Artificial Sequence: Synthetic oligonucleotide
  modified_base 1: mod_base = OTHER; note = 2' O-methyl modified nucleoside - 2' O-methyluridine phosphorothioate linkage
  modified_base 2: mod_base = OTHER; note = 2' fluoro-modified nucleoside - 2' fluorouridine phosphorothioate linkage
  modified_base 3: mod_base = OTHER; note = 2' O-methyl modified nucleoside - 2' O-methyladenosine
  modified_base 4: mod_base = OTHER; note = 2' fluoro-modified nucleoside - 2' fluoroadenosine
  modified_base 5: mod_base = OTHER; note = 2' O-methyl modified nucleoside - 2' O-methylguanosine
  modified_base 6: mod_base = OTHER; note = 2' fluoro-modified nucleoside - 2' fluoroguanosine
  modified_base 7: mod_base = OTHER; note = 2' O-methyl modified nucleoside - 2' O-methylcytidine
  modified_base 8: mod_base = OTHER; note = 2' fluoro-modified nucleoside - 2' fluoroadenosine
  modified_base 9: mod_base = OTHER; note = 2' O-methyl modified nucleoside - 2' O-methyladenosine
  modified_base 10: mod_base = OTHER; note = 2' fluoro-modified nucleoside - 2' fluorouridine
  modified_base 11: mod_base = OTHER; note = 2' O-methyl modified nucleoside - 2' O-methylguanosine
  modified_base 12: mod_base = OTHER; note = 2' O-methyl modified nucleoside - 2' O-methyluridine
  modified_base 13: mod_base = OTHER; note = 2' O-methyl modified nucleoside - 2' O-methylguanosine
  modified_base 14: mod_base = OTHER; note = 2' fluoro-modified nucleoside - 2' fluoroguanosine
  modified_base 15: mod_base = OTHER; note = 2' O-methyl modified nucleoside - 2' O-methylcytidine
  modified_base 16: mod_base = OTHER; note = 2' fluoro-modified nucleoside - 2' fluorocytidine
  modified_base 17: mod_base = OTHER; note = 2' O-methyl modified nucleoside - 2' O-methylguanosine
  modified_base 18: mod_base = OTHER; note = 2' fluoro-modified nucleoside - 2' fluoroadenosine
  modified_base 19: mod_base = OTHER; note = 2' O-methyl modified nucleoside - 2' O-methyluridine phosphorothioate linkage
  modified_base 20: mod_base = OTHER; note = 2' O-methyl modified nucleoside - 2' O-methyluridine phosphorothioate linkage
  modified_base 21: mod_base = OTHER; note = 2' O-methyl modified nucleoside - 2' O-methyluridine
ttaaggcaatgtggccgattt

SEQ ID NO: 26099 - RNA, 21 nt, synthetic construct
  source 1..21: mol_type = other RNA; note = Description of Artificial Sequence: Synthetic oligonucleotide
  modified_base 1: mod_base = OTHER; note = 2' O-methyl modified nucleoside - 2' O-methyluridine phosphorothioate linkage
  modified_base 2: mod_base = OTHER; note = 2' fluoro-modified nucleoside - 2' fluoroadenosine phosphorothioate linkage
  modified_base 3: mod_base = OTHER; note = 2' O-methyl modified nucleoside - 2' O-methylguanosine
  modified_base 4: mod_base = OTHER; note = 2' fluoro-modified nucleoside - 2' fluorouridine
  modified_base 5: mod_base = OTHER; note = 2' O-methyl modified nucleoside - 2' O-methyladenosine
  modified_base 6: mod_base = OTHER; note = 2' fluoro-modified nucleoside - 2' fluoroadenosine
  modified_base 7: mod_base = OTHER; note = 2' O-methyl modified nucleoside - 2' O-methylguanosine
  modified_base 8: mod_base = OTHER; note = 2' fluoro-modified nucleoside - 2' fluoroguanosine
  modified_base 9: mod_base = OTHER; note = 2' O-methyl modified nucleoside - 2' O-methylcytidine
  modified_base 10: mod_base = OTHER; note = 2' fluoro-modified nucleoside - 2' fluoroadenosine
  modified_base 11: mod_base = OTHER; note = 2' O-methyl modified nucleoside - 2' O-methyladenosine
  modified_base 12: mod_base = OTHER; note = 2' O-methyl modified nucleoside - 2' O-methyluridine
  modified_base 13: mod_base = OTHER; note = 2' O-methyl modified nucleoside - 2' O-methylguanosine
  modified_base 14: mod_base = OTHER; note = 2' fluoro-modified nucleoside - 2' fluorouridine
  modified_base 15: mod_base = OTHER; note = 2' O-methyl modified nucleoside - 2' O-methylguanosine
  modified_base 16: mod_base = OTHER; note = 2' fluoro-modified nucleoside - 2' fluoroguanosine
  modified_base 17: mod_base = OTHER; note = 2' O-methyl modified nucleoside - 2' O-methylcytidine
  modified_base 18: mod_base = OTHER; note = 2' fluoro-modified nucleoside - 2' fluorocytidine
  modified_base 19: mod_base = OTHER; note = 2' O-methyl modified nucleoside - 2' O-methylguanosine phosphorothioate linkage
  modified_base 20: mod_base = OTHER; note = 2' O-methyl modified nucleoside - 2' O-methyluridine phosphorothioate linkage
  modified_base 21: mod_base = OTHER; note = 2' O-methyl modified nucleoside - 2' O-methyluridine
tagtaaggcaatgtggccgtt

SEQ ID NO: 26100 - RNA, 21 nt, synthetic construct
  source 1..21: mol_type = other RNA; note = Description of Artificial Sequence: Synthetic oligonucleotide
  modified_base 1: mod_base = OTHER; note = 2' O-methyl modified nucleoside - 2' O-methyluridine phosphorothioate linkage
  modified_base 2: mod_base = OTHER; note = 2' fluoro-modified nucleoside - 2' fluoroadenosine phosphorothioate linkage
  modified_base 3: mod_base = OTHER; note = 2' O-methyl modified nucleoside - 2' O-methylguanosine
  modified_base 4: mod_base = OTHER; note = 2' fluoro-modified nucleoside - 2' fluoroguanosine
  modified_base 5: mod_base = OTHER; note = 2' O-methyl modified nucleoside - 2' O-methyladenosine
  modified_base 6: mod_base = OTHER; note = 2' fluoro-modified nucleoside - 2' fluoroadenosine
  modified_base 7: mod_base = OTHER; note = 2' O-methyl modified nucleoside - 2' O-methylguanosine
  modified_base 8: mod_base = OTHER; note = 2' fluoro-modified nucleoside - 2' fluoroadenosine
  modified_base 9: mod_base = OTHER; note = 2' O-methyl modified nucleoside - 2' O-methyladenosine
  modified_base 10: mod_base = OTHER; note = 2' fluoro-modified nucleoside - 2' fluorocytidine
  modified_base 11: mod_base = OTHER; note = 2' O-methyl modified nucleoside - 2' O-methylcytidine
  modified_base 12: mod_base = OTHER; note = 2' O-methyl modified nucleoside - 2' O-methyladenosine
  modified_base 13: mod_base = OTHER; note = 2' O-methyl modified nucleoside - 2' O-methyladenosine
  modified_base 14: mod_base = OTHER; note = 2' fluoro-modified nucleoside - 2' fluorocytidine
  modified_base 15: mod_base = OTHER; note = 2' O-methyl modified nucleoside - 2' O-methylcytidine
  modified_base 16: mod_base = OTHER; note = 2' fluoro-modified nucleoside - 2' fluoroguanosine
  modified_base 17: mod_base = OTHER; note = 2' O-methyl modified nucleoside - 2' O-methylcytidine
  modified_base 18: mod_base = OTHER; note = 2' fluoro-modified nucleoside - 2' fluoroguanosine
  modified_base 19: mod_base = OTHER; note = 2' O-methyl modified nucleoside - 2' O-methylguanosine phosphorothioate linkage
  modified_base 20: mod_base = OTHER; note = 2' O-methyl modified nucleoside - 2' O-methyluridine phosphorothioate linkage
  modified_base 21: mod_base = OTHER; note = 2' O-methyl modified nucleoside - 2' O-methyluridine
taggaagaaccaaccgcggtt

SEQ ID NO: 26101 - RNA, 21 nt, synthetic construct
  source 1..21: mol_type = other RNA; note = Description of Artificial Sequence: Synthetic oligonucleotide
  modified_base 1: mod_base = OTHER; note = 2' O-methyl modified nucleoside - 2' O-methyluridine phosphorothioate linkage
  modified_base 2: mod_base = OTHER; note = 2' fluoro-modified nucleoside - 2' fluorocytidine phosphorothioate linkage
  modified_base 3: mod_base = OTHER; note = 2' O-methyl modified nucleoside - 2' O-methyladenosine
  modified_base 4: mod_base = OTHER; note = 2' fluoro-modified nucleoside - 2' fluoroadenosine
  modified_base 5: mod_base = OTHER; note = 2' O-methyl modified nucleoside - 2' O-methylguanosine
  modified_base 6: mod_base = OTHER; note = 2' fluoro-modified nucleoside - 2' fluoroguanosine
  modified_base 7: mod_base = OTHER; note = 2' O-methyl modified nucleoside - 2' O-methyladenosine
  modified_base 8: mod_base = OTHER; note = 2' fluoro-modified nucleoside - 2' fluoroadenosine
  modified_base 9: mod_base = OTHER; note = 2' O-methyl modified nucleoside - 2' O-methylguanosine
  modified_base 10: mod_base = OTHER; note = 2' fluoro-modified nucleoside - 2' fluoroadenosine
  modified_base 11: mod_base = OTHER; note = 2' O-methyl modified nucleoside - 2' O-methyladenosine
  modified_base 12: mod_base = OTHER; note = 2' O-methyl modified nucleoside - 2' O-methylcytidine
  modified_base 13: mod_base = OTHER; note = 2' O-methyl modified nucleoside - 2' O-methylcytidine
  modified_base 14: mod_base = OTHER; note = 2' fluoro-modified nucleoside - 2' fluoroadenosine
  modified_base 15: mod_base = OTHER; note = 2' O-methyl modified nucleoside - 2' O-methyladenosine
  modified_base 16: mod_base = OTHER; note = 2' fluoro-modified nucleoside - 2' fluorocytidine
  modified_base 17: mod_base = OTHER; note = 2' O-methyl modified nucleoside - 2' O-methylcytidine
  modified_base 18: mod_base = OTHER; note = 2' fluoro-modified nucleoside - 2' fluoroguanosine
  modified_base 19: mod_base = OTHER; note = 2' O-methyl modified nucleoside - 2' O-methylcytidine phosphorothioate linkage
  modified_base 20: mod_base = OTHER; note = 2' O-methyl modified nucleoside - 2' O-methyluridine phosphorothioate linkage
  modified_base 21: mod_base = OTHER; note = 2' O-methyl modified nucleoside - 2' O-methyluridine
tcaaggaagaaccaaccgctt

SEQ ID NO: 26102 - RNA, 21 nt, synthetic construct
  source 1..21: mol_type = other RNA; note = Description of Artificial Sequence: Synthetic oligonucleotide
  modified_base 1: mod_base = OTHER; note = 2' O-methyl modified nucleoside - 2' O-methyluridine phosphorothioate linkage
  modified_base 2: mod_base = OTHER; note = 2' fluoro-modified nucleoside - 2' fluoroadenosine phosphorothioate linkage
  modified_base 3: mod_base = OTHER; note = 2' O-methyl modified nucleoside - 2' O-methylguanosine
  modified_base 4: mod_base = OTHER; note = 2' fluoro-modified nucleoside - 2' fluorocytidine
  modified_base 5: mod_base = OTHER; note = 2' O-methyl modified nucleoside - 2' O-methyladenosine
  modified_base 6: mod_base = OTHER; note = 2' fluoro-modified nucleoside - 2' fluoroadenosine
  modified_base 7: mod_base = OTHER; note = 2' O-methyl modified nucleoside - 2' O-methylguanosine
  modified_base 8: mod_base = OTHER; note = 2' fluoro-modified nucleoside - 2' fluoroguanosine
  modified_base 9: mod_base = OTHER; note = 2' O-methyl modified nucleoside - 2' O-methyladenosine
  modified_base 10: mod_base = OTHER; note = 2' fluoro-modified nucleoside - 2' fluoroadenosine
  modified_base 11: mod_base = OTHER; note = 2' O-methyl modified nucleoside - 2' O-methylguanosine
  modified_base 12: mod_base = OTHER; note = 2' O-methyl modified nucleoside - 2' O-methyladenosine
  modified_base 13: mod_base = OTHER; note = 2' O-methyl modified nucleoside - 2' O-methyladenosine
  modified_base 14: mod_base = OTHER; note = 2' fluoro-modified nucleoside - 2' fluorocytidine
  modified_base 15: mod_base = OTHER; note = 2' O-methyl modified nucleoside - 2' O-methylcytidine
  modified_base 16: mod_base = OTHER; note = 2' fluoro-modified nucleoside - 2' fluoroadenosine
  modified_base 17: mod_base = OTHER; note = 2' O-methyl modified nucleoside - 2' O-methyladenosine
  modified_base 18: mod_base = OTHER; note = 2' fluoro-modified nucleoside - 2' fluorocytidine
  modified_base 19: mod_base = OTHER; note = 2' O-methyl modified nucleoside - 2' O-methylcytidine phosphorothioate linkage
  modified_base 20: mod_base = OTHER; note = 2' O-methyl modified nucleoside - 2' O-methyluridine phosphorothioate linkage
  modified_base 21: mod_base = OTHER; note = 2' O-methyl modified nucleoside - 2' O-methyluridine
tagcaaggaagaaccaacctt

SEQ ID NO: 26103 - RNA, 21 nt, synthetic construct
  source 1..21: mol_type = other RNA; note = Description of Artificial Sequence: Synthetic oligonucleotide
  modified_base 1: mod_base = OTHER; note = 2' O-methyl modified nucleoside - 2' O-methyluridine phosphorothioate linkage
  modified_base 2: mod_base = OTHER; note = 2' fluoro-modified nucleoside - 2' fluorouridine phosphorothioate linkage
  modified_base 3: mod_base = OTHER; note = 2' O-methyl modified nucleoside - 2' O-methyluridine
  modified_base 4: mod_base = OTHER; note = 2' fluoro-modified nucleoside - 2' fluoroguanosine
  modified_base 5: mod_base = OTHER; note = 2' O-methyl modified nucleoside - 2' O-methyladenosine
  modified_base 6: mod_base = OTHER; note = 2' fluoro-modified nucleoside - 2' fluoroguanosine
  modified_base 7: mod_base = OTHER; note = 2' O-methyl modified nucleoside - 2' O-methyluridine
  modified_base 8: mod_base = OTHER; note = 2' fluoro-modified nucleoside - 2' fluoroadenosine
  modified_base 9: mod_base = OTHER; note = 2' O-methyl modified nucleoside - 2' O-methylguanosine
  modified_base 10: mod_base = OTHER; note = 2' fluoro-modified nucleoside - 2' fluoroadenosine
  modified_base 11: mod_base = OTHER; note = 2' O-methyl modified nucleoside - 2' O-methylguanosine
  modified_base 12: mod_base = OTHER; note = 2' O-methyl modified nucleoside - 2' O-methylcytidine
  modified_base 13: mod_base = OTHER; note = 2' O-methyl modified nucleoside - 2' O-methyladenosine
  modified_base 14: mod_base = OTHER; note = 2' fluoro-modified nucleoside - 2' fluoroadenosine
  modified_base 15: mod_base = OTHER; note = 2' O-methyl modified nucleoside - 2' O-methylguanosine
  modified_base 16: mod_base = OTHER; note = 2' fluoro-modified nucleoside - 2' fluoroguanosine
  modified_base 17: mod_base = OTHER; note = 2' O-methyl modified nucleoside - 2' O-methyladenosine
  modified_base 18: mod_base = OTHER; note = 2' fluoro-modified nucleoside - 2' fluoroadenosine
  modified_base 19: mod_base = OTHER; note = 2' O-methyl modified nucleoside - 2' O-methylguanosine phosphorothioate linkage
  modified_base 20: mod_base = OTHER; note = 2' O-methyl modified nucleoside - 2' O-methyluridine phosphorothioate linkage
  modified_base 21: mod_base = OTHER; note = 2' O-methyl modified nucleoside - 2' O-methyluridine
tttgagtagagcaaggaagtt

SEQ ID NO: 26104 - RNA, 21 nt, synthetic construct
  source 1..21: mol_type = other RNA; note = Description of Artificial Sequence: Synthetic oligonucleotide
  modified_base 1: mod_base = OTHER; note = 2' O-methyl modified nucleoside - 2' O-methyluridine phosphorothioate linkage
  modified_base 2: mod_base = OTHER; note = 2' fluoro-modified nucleoside - 2' fluorouridine phosphorothioate linkage
  modified_base 3: mod_base = OTHER; note = 2' O-methyl modified nucleoside - 2' O-methylcytidine
  modified_base 4: mod_base = OTHER; note = 2' fluoro-modified nucleoside - 2' fluoroguanosine
  modified_base 5: mod_base = OTHER; note = 2' O-methyl modified nucleoside - 2' O-methyladenosine
  modified_base 6: mod_base = OTHER; note = 2' fluoro-modified nucleoside - 2' fluoroguanosine
  modified_base 7: mod_base = OTHER; note = 2' O-methyl modified nucleoside - 2' O-methyladenosine
  modified_base 8: mod_base = OTHER; note = 2' fluoro-modified nucleoside - 2' fluoroguanosine
  modified_base 9: mod_base = OTHER; note = 2' O-methyl modified nucleoside - 2' O-methyluridine
  modified_base 10: mod_base = OTHER; note = 2' fluoro-modified nucleoside - 2' fluorocytidine
  modified_base 11: mod_base = OTHER; note = 2' O-methyl modified nucleoside - 2' O-methyladenosine
  modified_base 12: mod_base = OTHER; note = 2' O-methyl modified nucleoside - 2' O-methylguanosine
  modified_base 13: mod_base = OTHER; note = 2' O-methyl modified nucleoside - 2' O-methyladenosine
  modified_base 14: mod_base = OTHER; note = 2' fluoro-modified nucleoside - 2' fluoroguanosine
  modified_base 15: mod_base = OTHER; note = 2' O-methyl modified nucleoside - 2' O-methyladenosine
  modified_base 16: mod_base = OTHER; note = 2' fluoro-modified nucleoside - 2' fluoroguanosine
  modified_base 17: mod_base = OTHER; note = 2' O-methyl modified nucleoside - 2' O-methyladenosine
  modified_base 18: mod_base = OTHER; note = 2' fluoro-modified nucleoside - 2' fluoroadenosine
  modified_base 19: mod_base = OTHER; note = 2' O-methyl modified nucleoside - 2' O-methylguanosine phosphorothioate linkage
  modified_base 20: mod_base = OTHER; note = 2' O-methyl modified nucleoside - 2' O-methyluridine phosphorothioate linkage
  modified_base 21: mod_base = OTHER; note = 2' O-methyl modified nucleoside - 2' O-methyluridine
ttcgagagtcagagagaagtt

SEQ ID NO: 26105 - RNA, 21 nt, synthetic construct
  source 1..21: mol_type = other RNA; note = Description of Artificial Sequence: Synthetic oligonucleotide
  modified_base 1: mod_base = OTHER; note = 2' O-methyl modified nucleoside - 2' O-methyluridine phosphorothioate linkage
  modified_base 2: mod_base = OTHER; note = 2' fluoro-modified nucleoside - 2' fluoroadenosine phosphorothioate linkage
  modified_base 3: mod_base = OTHER; note = 2' O-methyl modified nucleoside - 2' O-methylcytidine
  modified_base 4: mod_base = OTHER; note = 2' fluoro-modified nucleoside - 2' fluoroadenosine
  modified_base 5: mod_base = OTHER; note = 2' O-methyl modified nucleoside - 2' O-methyladenosine
  modified_base 6: mod_base = OTHER; note = 2' fluoro-modified nucleoside - 2' fluoroguanosine
  modified_base 7: mod_base = OTHER; note = 2' O-methyl modified nucleoside - 2' O-methyluridine
  modified_base 8: mod_base = OTHER; note = 2' fluoro-modified nucleoside - 2' fluorocytidine
  modified_base 9: mod_base = OTHER; note = 2' O-methyl modified nucleoside - 2' O-methylguanosine
  modified_base 10: mod_base = OTHER; note = 2' fluoro-modified nucleoside - 2' fluoroadenosine
  modified_base 11: mod_base = OTHER; note = 2' O-methyl modified nucleoside - 2' O-methylguanosine
  modified_base 12: mod_base = OTHER; note = 2' O-methyl modified nucleoside - 2' O-methyladenosine
  modified_base 13: mod_base = OTHER; note = 2' O-methyl modified nucleoside - 2' O-methylguanosine
  modified_base 14: mod_base = OTHER; note = 2' fluoro-modified nucleoside - 2' fluorouridine
  modified_base 15: mod_base = OTHER; note = 2' O-methyl modified nucleoside - 2' O-methylcytidine
  modified_base 16: mod_base = OTHER; note = 2' fluoro-modified nucleoside - 2' fluoroadenosine
  modified_base 17: mod_base = OTHER; note = 2' O-methyl modified nucleoside - 2' O-methylguanosine
  modified_base 18: mod_base = OTHER; note = 2' fluoro-modified nucleoside - 2' fluoroadenosine
  modified_base 19: mod_base = OTHER; note = 2' O-methyl modified nucleoside - 2' O-methylguanosine phosphorothioate linkage
  modified_base 20: mod_base = OTHER; note = 2' O-methyl modified nucleoside - 2' O-methyluridine phosphorothioate linkage
  modified_base 21: mod_base = OTHER; note = 2' O-methyl modified nucleoside - 2' O-methyluridine
tacaagtcgagagtcagagtt

SEQ ID NO: 26106 - RNA, 21 nt, synthetic construct
  source 1..21: mol_type = other RNA; note = Description of Artificial Sequence: Synthetic oligonucleotide
  modified_base 1: mod_base = OTHER; note = 2' O-methyl modified nucleoside - 2' O-methyluridine phosphorothioate linkage
  modified_base 2: mod_base = OTHER; note = 2' fluoro-modified nucleoside - 2' fluoroadenosine phosphorothioate linkage
  modified_base 3: mod_base = OTHER; note = 2' O-methyl modified nucleoside - 2' O-methylcytidine
  modified_base 4: mod_base = OTHER; note = 2' fluoro-modified nucleoside - 2' fluoroadenosine
  modified_base 5: mod_base = OTHER; note = 2' O-methyl modified nucleoside - 2' O-methylcytidine
  modified_base 6: mod_base = OTHER; note = 2' fluoro-modified nucleoside - 2' fluoroadenosine
  modified_base 7: mod_base = OTHER; note = 2' O-methyl modified nucleoside - 2' O-methyladenosine
  modified_base 8: mod_base = OTHER; note = 2' fluoro-modified nucleoside - 2' fluoroguanosine
  modified_base 9: mod_base = OTHER; note = 2' O-methyl modified nucleoside - 2' O-methyluridine
  modified_base 10: mod_base = OTHER; note = 2' fluoro-modified nucleoside - 2' fluorocytidine
  modified_base 11: mod_base = OTHER; note = 2' O-methyl modified nucleoside - 2' O-methylguanosine
  modified_base 12: mod_base = OTHER; note = 2' O-methyl modified nucleoside - 2' O-methyladenosine
  modified_base 13: mod_base = OTHER; note = 2' O-methyl modified nucleoside - 2' O-methylguanosine
  modified_base 14: mod_base = OTHER; note = 2' fluoro-modified nucleoside - 2' fluoroadenosine
  modified_base 15: mod_base = OTHER; note = 2' O-methyl modified nucleoside - 2' O-methylguanosine
  modified_base 16: mod_base = OTHER; note = 2' fluoro-modified nucleoside - 2' fluorouridine
  modified_base 17: mod_base = OTHER; note = 2' O-methyl modified nucleoside - 2' O-methylcytidine
  modified_base 18: mod_base = OTHER; note = 2' fluoro-modified nucleoside - 2' fluoroadenosine
  modified_base 19: mod_base = OTHER; note = 2' O-methyl modified nucleoside - 2' O-methylguanosine phosphorothioate linkage
  modified_base 20: mod_base = OTHER; note = 2' O-methyl modified nucleoside - 2' O-methyluridine phosphorothioate linkage
  modified_base 21: mod_base = OTHER; note = 2' O-methyl modified nucleoside - 2' O-methyluridine
tacacaagtcgagagtcagtt

SEQ ID NO: 26107 - RNA, 21 nt, synthetic construct
  source 1..21: mol_type = other RNA; note = Description of Artificial Sequence: Synthetic oligonucleotide
  modified_base 1: mod_base = OTHER; note = 2' O-methyl modified nucleoside - 2' O-methyluridine phosphorothioate linkage
  modified_base 2: mod_base = OTHER; note = 2' fluoro-modified nucleoside - 2' fluoroadenosine phosphorothioate linkage
  modified_base 3: mod_base = OTHER; note = 2' O-methyl modified nucleoside - 2' O-methyladenosine
  modified_base 4: mod_base = OTHER; note = 2' fluoro-modified nucleoside - 2' fluorocytidine
  modified_base 5: mod_base = OTHER; note = 2' O-methyl modified nucleoside - 2' O-methyladenosine
  modified_base 6: mod_base = OTHER; note = 2' fluoro-modified nucleoside - 2' fluorocytidine
  modified_base 7: mod_base = OTHER; note = 2' O-methyl modified nucleoside - 2' O-methyladenosine
  modified_base 8: mod_base = OTHER; note = 2' fluoro-modified nucleoside - 2' fluoroadenosine
  modified_base 9: mod_base = OTHER; note = 2' O-methyl modified nucleoside - 2' O-methylguanosine
  modified_base 10: mod_base = OTHER; note = 2' fluoro-modified nucleoside - 2' fluorouridine
  modified_base 11: mod_base = OTHER; note = 2' O-methyl modified nucleoside - 2' O-methylcytidine
  modified_base 12: mod_base = OTHER; note = 2' O-methyl modified nucleoside - 2' O-methylguanosine
  modified_base 13: mod_base = OTHER; note = 2' O-methyl modified nucleoside - 2' O-methyladenosine
  modified_base 14: mod_base = OTHER; note = 2' fluoro-modified nucleoside - 2' fluoroguanosine
  modified_base 15: mod_base = OTHER; note = 2' O-methyl modified nucleoside - 2' O-methyladenosine
  modified_base 16: mod_base = OTHER; note = 2' fluoro-modified nucleoside - 2' fluoroguanosine
  modified_base 17: mod_base = OTHER; note = 2' O-methyl modified nucleoside - 2' O-methyluridine
  modified_base 18: mod_base = OTHER; note = 2' fluoro-modified nucleoside - 2' fluorocytidine
  modified_base 19: mod_base = OTHER; note = 2' O-methyl modified nucleoside - 2' O-methyladenosine phosphorothioate linkage
  modified_base 20: mod_base = OTHER; note = 2' O-methyl modified nucleoside - 2' O-methyluridine phosphorothioate linkage
  modified_base 21: mod_base = OTHER; note = 2' O-methyl modified nucleoside - 2' O-methyluridine
taacacaagtcgagagtcatt

SEQ ID NO: 26108 - RNA, 21 nt, synthetic construct
  source 1..21: mol_type = other RNA; note = Description of Artificial Sequence: Synthetic oligonucleotide
  modified_base 1: mod_base = OTHER; note = 2' O-methyl modified nucleoside - 2' O-methyluridine phosphorothioate linkage
  modified_base 2: mod_base = OTHER; note = 2' fluoro-modified nucleoside - 2' fluoroguanosine phosphorothioate linkage
  modified_base 3: mod_base = OTHER; note = 2' O-methyl modified nucleoside - 2' O-methylguanosine
  modified_base 4: mod_base = OTHER; note = 2' fluoro-modified nucleoside - 2' fluoroadenosine
  modified_base 5: mod_base = OTHER; note = 2' O-methyl modified nucleoside - 2' O-methyladenosine
  modified_base 6: mod_base = OTHER; note = 2' fluoro-modified nucleoside - 2' fluorocytidine
  modified_base 7: mod_base = OTHER; note = 2' O-methyl modified nucleoside - 2' O-methyladenosine
  modified_base 8: mod_base = OTHER; note = 2' fluoro-modified nucleoside - 2' fluorocytidine
  modified_base 9: mod_base = OTHER; note = 2' O-methyl modified nucleoside - 2' O-methyladenosine
  modified_base 10: mod_base = OTHER; note = 2' fluoro-modified nucleoside - 2' fluoroadenosine
  modified_base 11: mod_base = OTHER; note = 2' O-methyl modified nucleoside - 2' O-methylguanosine
  modified_base 12: mod_base = OTHER; note = 2' O-methyl modified nucleoside - 2' O-methyluridine
  modified_base 13: mod_base = OTHER; note = 2' O-methyl modified nucleoside - 2' O-methylcytidine
  modified_base 14: mod_base = OTHER; note = 2' fluoro-modified nucleoside - 2' fluoroguanosine
  modified_base 15: mod_base = OTHER; note = 2' O-methyl modified nucleoside - 2' O-methyladenosine
  modified_base 16: mod_base = OTHER; note = 2' fluoro-modified nucleoside - 2' fluoroguanosine
  modified_base 17: mod_base = OTHER; note = 2' O-methyl modified nucleoside - 2' O-methyladenosine
  modified_base 18: mod_base = OTHER; note = 2' fluoro-modified nucleoside - 2' fluoroguanosine
  modified_base 19: mod_base = OTHER; note = 2' O-methyl modified nucleoside - 2' O-methyluridine phosphorothioate linkage
  modified_base 20: mod_base = OTHER; note = 2' O-methyl modified nucleoside - 2' O-methyluridine phosphorothioate linkage
  modified_base 21: mod_base = OTHER; note = 2' O-methyl modified nucleoside - 2' O-methyluridine
tggaacacaagtcgagagttt

SEQ ID NO: 26109 - RNA, 21 nt, synthetic construct
  source 1..21: mol_type = other RNA; note = Description of Artificial Sequence: Synthetic oligonucleotide
  modified_base 1: mod_base = OTHER; note = 2' O-methyl modified nucleoside - 2' O-methyluridine phosphorothioate linkage
  modified_base 2: mod_base = OTHER; note = 2' fluoro-modified nucleoside - 2' fluoroguanosine phosphorothioate linkage
  modified_base 3: mod_base = OTHER; note = 2' O-methyl modified nucleoside - 2' O-methylguanosine
  modified_base 4: mod_base = OTHER; note = 2' fluoro-modified nucleoside - 2' fluoroguanosine
  modified_base 5: mod_base = OTHER; note = 2' O-methyl modified nucleoside - 2' O-methylguanosine
  modified_base 6: mod_base = OTHER; note = 2' fluoro-modified nucleoside - 2' fluoroadenosine
  modified_base 7: mod_base = OTHER; note = 2' O-methyl modified nucleoside - 2' O-methyladenosine
  modified_base 8: mod_base = OTHER; note = 2' fluoro-modified nucleoside - 2' fluorocytidine
  modified_base 9: mod_base = OTHER; note = 2' O-methyl modified nucleoside - 2' O-methyladenosine
  modified_base 10: mod_base = OTHER; note = 2' fluoro-modified nucleoside - 2' fluorocytidine
  modified_base 11: mod_base = OTHER; note = 2' O-methyl modified nucleoside - 2' O-methyladenosine
  modified_base 12: mod_base = OTHER; note = 2' O-methyl modified nucleoside - 2' O-methyladenosine
  modified_base 13: mod_base = OTHER; note = 2' O-methyl modified nucleoside - 2' O-methylguanosine
  modified_base 14: mod_base = OTHER; note = 2' fluoro-modified nucleoside - 2' fluorouridine
  modified_base 15: mod_base = OTHER; note = 2' O-methyl modified nucleoside - 2' O-methylcytidine
  modified_base 16: mod_base = OTHER; note = 2' fluoro-modified nucleoside - 2' fluoroguanosine
  modified_base 17: mod_base = OTHER; note = 2' O-methyl modified nucleoside - 2' O-methyladenosine
  modified_base 18: mod_base = OTHER; note = 2' fluoro-modified nucleoside - 2' fluoroguanosine
  modified_base 19: mod_base = OTHER; note = 2' O-methyl modified nucleoside - 2' O-methyladenosine phosphorothioate linkage
  modified_base 20: mod_base = OTHER; note = 2' O-methyl modified nucleoside - 2' O-methyluridine phosphorothioate linkage
  modified_base 21: mod_base = OTHER; note = 2' O-methyl modified nucleoside - 2' O-methyluridine
tggggaacacaagtcgagatt

SEQ ID NO: 26110 - RNA, 21 nt, synthetic construct
  source 1..21: mol_type = other RNA; note = Description of Artificial Sequence: Synthetic oligonucleotide
  modified_base 1: mod_base = OTHER; note = 2' O-methyl modified nucleoside - 2' O-methyluridine phosphorothioate linkage
  modified_base 2: mod_base = OTHER; note = 2' fluoro-modified nucleoside - 2' fluorocytidine phosphorothioate linkage
  modified_base 3: mod_base = OTHER; note = 2' O-methyl modified nucleoside - 2' O-methylguanosine
  modified_base 4: mod_base = OTHER; note = 2' fluoro-modified nucleoside - 2' fluoroguanosine
  modified_base 5: mod_base = OTHER; note = 2' O-methyl modified nucleoside - 2' O-methylguanosine
  modified_base 6: mod_base = OTHER; note = 2' fluoro-modified nucleoside - 2' fluoroguanosine
  modified_base 7: mod_base = OTHER; note = 2' O-methyl modified nucleoside - 2' O-methyladenosine
  modified_base 8: mod_base = OTHER; note = 2' fluoro-modified nucleoside - 2' fluoroadenosine
  modified_base 9: mod_base = OTHER; note = 2' O-methyl modified nucleoside - 2' O-methylcytidine
  modified_base 10: mod_base = OTHER; note = 2' fluoro-modified nucleoside - 2' fluoroadenosine
  modified_base 11: mod_base = OTHER; note = 2' O-methyl modified nucleoside - 2' O-methylcytidine
  modified_base 12: mod_base = OTHER; note = 2' O-methyl modified nucleoside - 2' O-methyladenosine
  modified_base 13: mod_base = OTHER; note = 2' O-methyl modified nucleoside - 2' O-methyladenosine
  modified_base 14: mod_base = OTHER; note = 2' fluoro-modified nucleoside - 2' fluoroguanosine
  modified_base 15: mod_base = OTHER; note = 2' O-methyl modified nucleoside - 2' O-methyluridine
  modified_base 16: mod_base = OTHER; note = 2' fluoro-modified nucleoside - 2' fluorocytidine
  modified_base 17: mod_base = OTHER; note = 2' O-methyl modified nucleoside - 2' O-methylguanosine
  modified_base 18: mod_base = OTHER; note = 2' fluoro-modified nucleoside - 2' fluoroadenosine
  modified_base 19: mod_base = OTHER; note = 2' O-methyl modified nucleoside - 2' O-methylguanosine phosphorothioate linkage
  modified_base 20: mod_base = OTHER; note = 2' O-methyl modified nucleoside - 2' O-methyluridine phosphorothioate linkage
  modified_base 21: mod_base = OTHER; note = 2' O-methyl modified nucleoside - 2' O-methyluridine
tcggggaacacaagtcgagtt

SEQ ID NO: 26111 - RNA, 21 nt, synthetic construct
  source 1..21: mol_type = other RNA; note = Description of Artificial Sequence: Synthetic oligonucleotide
  modified_base 1: mod_base = OTHER; note = 2' O-methyl modified nucleoside - 2' O-methyluridine phosphorothioate linkage
  modified_base 2: mod_base = OTHER; note = 2' fluoro-modified nucleoside - 2' fluoroguanosine phosphorothioate linkage
  modified_base 3: mod_base = OTHER; note = 2' O-methyl modified nucleoside - 2' O-methylcytidine
  modified_base 4: mod_base = OTHER; note = 2' fluoro-modified nucleoside - 2' fluoroguanosine
  modified_base 5: mod_base = OTHER; note = 2' O-methyl modified nucleoside - 2' O-methylguanosine
  modified_base 6: mod_base = OTHER; note = 2' fluoro-modified nucleoside - 2' fluoroguanosine
  modified_base 7: mod_base = OTHER; note = 2' O-methyl modified nucleoside - 2' O-methylguanosine
  modified_base 8: mod_base = OTHER; note = 2' fluoro-modified nucleoside - 2' fluoroadenosine
  modified_base 9: mod_base = OTHER; note = 2' O-methyl modified nucleoside - 2' O-methyladenosine
  modified_base 10: mod_base = OTHER; note = 2' fluoro-modified nucleoside - 2' fluorocytidine
  modified_base 11: mod_base = OTHER; note = 2' O-methyl modified nucleoside - 2' O-methyladenosine
  modified_base 12: mod_base = OTHER; note = 2' O-methyl modified nucleoside - 2' O-methylcytidine
  modified_base 13: mod_base = OTHER; note = 2' O-methyl modified nucleoside - 2' O-methyladenosine
  modified_base 14: mod_base = OTHER; note = 2' fluoro-modified nucleoside - 2' fluoroadenosine
  modified_base 15: mod_base = OTHER; note = 2' O-methyl modified nucleoside - 2' O-methylguanosine
  modified_base 16: mod_base = OTHER; note = 2' fluoro-modified nucleoside - 2' fluorouridine
  modified_base 17: mod_base = OTHER; note = 2' O-methyl modified nucleoside - 2' O-methylcytidine
  modified_base 18: mod_base = OTHER; note = 2' fluoro-modified nucleoside - 2' fluoroguanosine
  modified_base 19: mod_base = OTHER; note = 2' O-methyl modified nucleoside - 2' O-methyladenosine phosphorothioate linkage
  modified_base 20: mod_base = OTHER; note = 2' O-methyl modified nucleoside - 2' O-methyluridine phosphorothioate linkage
  modified_base 21: mod_base = OTHER; note = 2' O-methyl modified nucleoside - 2' O-methyluridine
tgcggggaacacaagtcgatt

SEQ ID NO: 26112 - RNA, 21 nt, synthetic construct
  source 1..21: mol_type = other RNA; note = Description of Artificial Sequence: Synthetic oligonucleotide
  modified_base 1: mod_base = OTHER; note = 2' O-methyl modified nucleoside - 2' O-methyluridine phosphorothioate linkage
  modified_base 2: mod_base = OTHER; note = 2' fluoro-modified nucleoside - 2' fluoroadenosine phosphorothioate linkage
  modified_base 3: mod_base = OTHER; note = 2' O-methyl modified nucleoside - 2' O-methylguanosine
  modified_base 4: mod_base = OTHER; note = 2' fluoro-modified nucleoside - 2' fluorocytidine
  modified_base 5: mod_base = OTHER; note = 2' O-methyl modified nucleoside - 2' O-methylguanosine
  modified_base 6: mod_base = OTHER; note = 2' fluoro-modified nucleoside - 2' fluoroguanosine
  modified_base 7: mod_base = OTHER; note = 2' O-methyl modified nucleoside - 2' O-methylguanosine
  modified_base 8: mod_base = OTHER; note = 2' fluoro-modified nucleoside - 2' fluoroguanosine
  modified_base 9: mod_base = OTHER; note = 2' O-methyl modified nucleoside - 2' O-methyladenosine
  modified_base 10: mod_base = OTHER; note = 2' fluoro-modified nucleoside - 2' fluoroadenosine
  modified_base 11: mod_base = OTHER; note = 2' O-methyl modified nucleoside - 2' O-methylcytidine
  modified_base 12: mod_base = OTHER; note = 2' O-methyl modified nucleoside - 2' O-methyladenosine
  modified_base 13: mod_base = OTHER; note = 2' O-methyl modified nucleoside - 2' O-methylcytidine
  modified_base 14: mod_base = OTHER; note = 2' fluoro-modified nucleoside - 2' fluoroadenosine
  modified_base 15: mod_base = OTHER; note = 2' O-methyl modified nucleoside - 2' O-methyladenosine
  modified_base 16: mod_base = OTHER; note = 2' fluoro-modified nucleoside - 2' fluoroguanosine
  modified_base 17: mod_base = OTHER; note = 2' O-methyl modified nucleoside - 2' O-methyluridine
  modified_base 18: mod_base = OTHER; note = 2' fluoro-modified nucleoside - 2' fluorocytidine
  modified_base 19: mod_base = OTHER; note = 2' O-methyl modified nucleoside - 2' O-methylguanosine phosphorothioate linkage
  modified_base 20: mod_base = OTHER; note = 2' O-methyl modified nucleoside - 2' O-methyluridine phosphorothioate linkage
  modified_base 21: mod_base = OTHER; note = 2' O-methyl modified nucleoside - 2' O-methyluridine
tagcggggaacacaagtcgtt

SEQ ID NO: 26113 - RNA, 21 nt, synthetic construct
  source 1..21: mol_type = other RNA; note = Description of Artificial Sequence: Synthetic oligonucleotide
  modified_base 1: mod_base = OTHER; note = 2' O-methyl modified nucleoside - 2' O-methyluridine phosphorothioate linkage
  modified_base 2: mod_base = OTHER; note = 2' fluoro-modified nucleoside - 2' fluoroguanosine phosphorothioate linkage
  modified_base 3: mod_base = OTHER; note = 2' O-methyl modified nucleoside - 2' O-methyladenosine
  modified_base 4: mod_base = OTHER; note = 2' fluoro-modified nucleoside - 2' fluoroguanosine
  modified_base 5: mod_base = OTHER; note = 2' O-methyl modified nucleoside - 2' O-methylcytidine
  modified_base 6: mod_base = OTHER; note = 2' fluoro-modified nucleoside - 2' fluoroguanosine
  modified_base 7: mod_base = OTHER; note = 2' O-methyl modified nucleoside - 2' O-methylguanosine
  modified_base 8: mod_base = OTHER; note = 2' fluoro-modified nucleoside - 2' fluoroguanosine
  modified_base 9: mod_base = OTHER; note = 2' O-methyl modified nucleoside - 2' O-methylguanosine
  modified_base 10: mod_base = OTHER; note = 2' fluoro-modified nucleoside - 2' fluoroadenosine
  modified_base 11: mod_base = OTHER; note = 2' O-methyl modified nucleoside - 2' O-methyladenosine
  modified_base 12: mod_base = OTHER; note = 2' O-methyl modified nucleoside - 2' O-methylcytidine
  modified_base 13: mod_base = OTHER; note = 2' O-methyl modified nucleoside - 2' O-methyladenosine
  modified_base 14: mod_base = OTHER; note = 2' fluoro-modified nucleoside - 2' fluorocytidine
  modified_base 15: mod_base = OTHER; note = 2' O-methyl modified nucleoside - 2' O-methyladenosine
  modified_base 16: mod_base = OTHER; note = 2' fluoro-modified nucleoside - 2' fluoroadenosine
  modified_base 17: mod_base = OTHER; note = 2' O-methyl modified nucleoside - 2' O-methylguanosine
  modified_base 18: mod_base = OTHER; note = 2' fluoro-modified nucleoside - 2' fluorouridine
  modified_base 19: mod_base = OTHER; note = 2' O-methyl modified nucleoside - 2' O-methylcytidine phosphorothioate linkage
  modified_base 20: mod_base = OTHER; note = 2' O-methyl modified nucleoside - 2' O-methyluridine phosphorothioate linkage
  modified_base 21: mod_base = OTHER; note = 2' O-methyl modified nucleoside - 2' O-methyluridine
tgagcggggaacacaagtctt

SEQ ID NO: 26114 - RNA, 21 nt, synthetic construct
  source 1..21: mol_type = other RNA; note = Description of Artificial Sequence: Synthetic oligonucleotide
  modified_base 1: mod_base = OTHER; note = 2' O-methyl modified nucleoside - 2' O-methyluridine phosphorothioate linkage
  modified_base 2: mod_base = OTHER; note = 2' fluoro-modified nucleoside - 2' fluoroguanosine phosphorothioate linkage
  modified_base 3: mod_base = OTHER; note = 2' O-methyl modified nucleoside - 2' O-methylguanosine
  modified_base 4: mod_base = OTHER; note = 2' fluoro-modified nucleoside - 2' fluoroadenosine
  modified_base 5: mod_base = OTHER; note = 2' O-methyl modified nucleoside - 2' O-methylguanosine
  modified_base 6: mod_base = OTHER; note = 2' fluoro-modified nucleoside - 2' fluorocytidine
  modified_base 7: mod_base = OTHER; note = 2' O-methyl modified nucleoside - 2' O-methylguanosine
  modified_base 8: mod_base = OTHER; note = 2' fluoro-modified nucleoside - 2' fluoroguanosine
  modified_base 9: mod_base = OTHER; note = 2' O-methyl modified nucleoside - 2' O-methylguanosine
  modified_base 10: mod_base = OTHER; note = 2' fluoro-modified nucleoside - 2' fluoroguanosine
  modified_base 11: mod_base = OTHER; note = 2' O-methyl modified nucleoside - 2' O-methyladenosine
  modified_base 12: mod_base = OTHER; note = 2' O-methyl modified nucleoside - 2' O-methyladenosine
  modified_base 13: mod_base = OTHER; note = 2' O-methyl modified nucleoside - 2' O-methylcytidine
  modified_base 14: mod_base = OTHER; note = 2' fluoro-modified nucleoside - 2' fluoroadenosine
  modified_base 15: mod_base = OTHER; note = 2' O-methyl modified nucleoside - 2' O-methylcytidine
  modified_base 16: mod_base = OTHER; note = 2' fluoro-modified nucleoside - 2' fluoroadenosine
  modified_base 17: mod_base = OTHER; note = 2' O-methyl modified nucleoside - 2' O-methyladenosine
  modified_base 18: mod_base = OTHER; note = 2' fluoro-modified nucleoside - 2' fluoroguanosine
  modified_base 19: mod_base = OTHER; note = 2' O-methyl modified nucleoside - 2' O-methyluridine phosphorothioate linkage
  modified_base 20: mod_base = OTHER; note = 2' O-methyl modified nucleoside - 2' O-methyluridine phosphorothioate linkage
  modified_base 21: mod_base = OTHER; note = 2' O-methyl modified nucleoside - 2' O-methyluridine
tggagcggggaacacaagttt

SEQ ID NO: 26115 - RNA, 21 nt, synthetic construct
  source 1..21: mol_type = other RNA; note = Description of Artificial Sequence: Synthetic oligonucleotide
  modified_base 1: mod_base = OTHER; note = 2' O-methyl modified nucleoside - 2' O-methyluridine phosphorothioate linkage
  modified_base 2: mod_base = OTHER; note = 2' fluoro-modified nucleoside - 2' fluoroadenosine phosphorothioate linkage
  modified_base 3: mod_base = OTHER; note = 2' O-methyl modified nucleoside - 2' O-methyluridine
  modified_base 4: mod_base = OTHER; note = 2' fluoro-modified nucleoside - 2' fluorouridine
  modified_base 5: mod_base = OTHER; note = 2' O-methyl modified nucleoside - 2' O-methylguanosine
  modified_base 6: mod_base = OTHER; note = 2' fluoro-modified nucleoside - 2' fluoroadenosine
  modified_base 7: mod_base = OTHER; note = 2' O-methyl modified nucleoside - 2' O-methylguanosine
  modified_base 8: mod_base = OTHER; note = 2' fluoro-modified nucleoside - 2' fluorouridine
  modified_base 9: mod_base = OTHER; note = 2' O-methyl modified nucleoside - 2' O-methylguanosine
  modified_base 10: mod_base = OTHER; note = 2' fluoro-modified nucleoside - 2' fluoroadenosine
  modified_base 11: mod_base = OTHER; note = 2' O-methyl modified nucleoside - 2' O-methyladenosine
  modified_base 12: mod_base = OTHER; note = 2' O-methyl modified nucleoside - 2' O-methyladenosine
  modified_base 13: mod_base = OTHER; note = 2' O-methyl modified nucleoside - 2' O-methylguanosine
  modified_base 14: mod_base = OTHER; note = 2' fluoro-modified nucleoside - 2' fluoroguanosine
  modified_base 15: mod_base = OTHER; note = 2' O-methyl modified nucleoside - 2' O-methylguanosine
  modified_base 16: mod_base = OTHER; note = 2' fluoro-modified nucleoside - 2' fluoroguanosine
  modified_base 17: mod_base = OTHER; note = 2' O-methyl modified nucleoside - 2' O-methyladenosine
  modified_base 18: mod_base = OTHER; note = 2' fluoro-modified nucleoside - 2' fluoroguanosine
  modified_base 19: mod_base = OTHER; note = 2' O-methyl modified nucleoside - 2' O-methylguanosine phosphorothioate linkage
  modified_base 20: mod_base = OTHER; note = 2' O-methyl modified nucleoside - 2' O-methyluridine phosphorothioate linkage
  modified_base 21: mod_base = OTHER; note = 2' O-methyl modified nucleoside - 2' O-methyluridine
tattgagtgaaaggggaggtt

SEQ ID NO: 26116 - RNA, 21 nt, synthetic construct
  source 1..21: mol_type = other RNA; note = Description of Artificial Sequence: Synthetic oligonucleotide
  modified_base 1: mod_base = OTHER; note = 2' O-methyl modified nucleoside - 2' O-methyluridine phosphorothioate linkage
  modified_base 2: mod_base = OTHER; note = 2' fluoro-modified nucleoside - 2' fluoroadenosine phosphorothioate linkage
  modified_base 3: mod_base = OTHER; note = 2' O-methyl modified nucleoside - 2' O-methyladenosine
  modified_base 4: mod_base = OTHER; note = 2' fluoro-modified nucleoside - 2' fluorouridine
  modified_base 5: mod_base = OTHER; note = 2' O-methyl modified nucleoside - 2' O-methyluridine
  modified_base 6: mod_base = OTHER; note = 2' fluoro-modified nucleoside - 2' fluoroguanosine
  modified_base 7: mod_base = OTHER; note = 2' O-methyl modified nucleoside - 2' O-methyladenosine
  modified_base 8: mod_base = OTHER; note = 2' fluoro-modified nucleoside - 2' fluoroguanosine
  modified_base 9: mod_base = OTHER; note = 2' O-methyl modified nucleoside - 2' O-methyluridine
  modified_base 10: mod_base = OTHER; note = 2' fluoro-modified nucleoside - 2' fluoroguanosine
  modified_base 11: mod_base = OTHER; note = 2' O-methyl modified nucleoside - 2' O-methyladenosine
  modified_base 12: mod_base = OTHER; note = 2' O-methyl modified nucleoside - 2' O-methyladenosine
  modified_base 13: mod_base = OTHER; note = 2' O-methyl modified nucleoside - 2' O-methyladenosine
  modified_base 14: mod_base = OTHER; note = 2' fluoro-modified nucleoside - 2' fluoroguanosine
  modified_base 15: mod_base = OTHER; note = 2' O-methyl modified nucleoside - 2' O-methylguanosine
  modified_base 16: mod_base = OTHER; note = 2' fluoro-modified nucleoside - 2' fluoroguanosine
  modified_base 17: mod_base = OTHER; note = 2' O-methyl modified nucleoside - 2' O-methylguanosine
  modified_base 18: mod_base = OTHER; note = 2' fluoro-modified nucleoside - 2' fluoroadenosine
  modified_base 19: mod_base = OTHER; note = 2' O-methyl modified nucleoside - 2' O-methylguanosine phosphorothioate linkage
  modified_base 20: mod_base = OTHER; note = 2' O-methyl modified nucleoside - 2' O-methyluridine phosphorothioate linkage
  modified_base 21: mod_base = OTHER; note = 2' O-methyl modified nucleoside - 2' O-methyluridine
taattgagtgaaaggggagtt

SEQ ID NO: 26117 - RNA, 21 nt, synthetic construct
  source 1..21: mol_type = other RNA; note = Description of Artificial Sequence: Synthetic oligonucleotide
  modified_base 1: mod_base = OTHER; note = 2' O-methyl modified nucleoside - 2' O-methyluridine phosphorothioate linkage
  modified_base 2: mod_base = OTHER; note = 2' fluoro-modified nucleoside - 2' fluoroadenosine phosphorothioate linkage
  modified_base 3: mod_base = OTHER; note = 2' O-methyl modified nucleoside - 2' O-methylguanosine
  modified_base 4: mod_base = OTHER; note = 2' fluoro-modified nucleoside - 2' fluoroadenosine
  modified_base 5: mod_base = OTHER; note = 2' O-methyl modified nucleoside - 2' O-methyladenosine
  modified_base 6: mod_base = OTHER; note = 2' fluoro-modified nucleoside - 2' fluorouridine
  modified_base 7: mod_base = OTHER; note = 2' O-methyl modified nucleoside - 2' O-methyluridine
  modified_base 8: mod_base = OTHER; note = 2' fluoro-modified nucleoside - 2' fluoroguanosine
  modified_base 9: mod_base = OTHER; note = 2' O-methyl modified nucleoside - 2' O-methyladenosine
  modified_base 10: mod_base = OTHER; note = 2' fluoro-modified nucleoside - 2' fluoroguanosine
  modified_base 11: mod_base = OTHER; note = 2' O-methyl modified nucleoside - 2' O-methyluridine
  modified_base 12: mod_base = OTHER; note = 2' O-methyl modified nucleoside - 2' O-methylguanosine
  modified_base 13: mod_base = OTHER; note = 2' O-methyl modified nucleoside - 2' O-methyladenosine
  modified_base 14: mod_base = OTHER; note = 2' fluoro-modified nucleoside - 2' fluoroadenosine
  modified_base 15: mod_base = OTHER; note = 2' O-methyl modified nucleoside - 2' O-methyladenosine
  modified_base 16: mod_base = OTHER; note = 2' fluoro-modified nucleoside - 2' fluoroguanosine
  modified_base 17: mod_base = OTHER; note = 2' O-methyl modified nucleoside - 2' O-methylguanosine
  modified_base 18: mod_base = OTHER; note = 2' fluoro-modified nucleoside - 2' fluoroguanosine
  modified_base 19: mod_base = OTHER; note = 2' O-methyl modified nucleoside - 2' O-methylguanosine phosphorothioate linkage
  modified_base 20: mod_base = OTHER; note = 2' O-methyl modified nucleoside - 2' O-methyluridine phosphorothioate linkage
  modified_base 21: mod_base = OTHER; note = 2' O-methyl modified nucleoside - 2' O-methyluridine
tagaattgagtgaaaggggtt

SEQ ID NO: 26118 - RNA, 21 nt, synthetic construct
  source 1..21: mol_type = other RNA; note = Description of Artificial Sequence: Synthetic oligonucleotide
  modified_base 1: mod_base = OTHER; note = 2' O-methyl modified nucleoside - 2' O-methyluridine phosphorothioate linkage
  modified_base 2: mod_base = OTHER; note = 2' fluoro-modified nucleoside - 2' fluoroguanosine phosphorothioate linkage
  modified_base 3: mod_base = OTHER; note = 2' O-methyl modified nucleoside - 2' O-methyladenosine
  modified_base 4: mod_base = OTHER; note = 2' fluoro-modified nucleoside - 2' fluoroguanosine
  modified_base 5: mod_base = OTHER; note = 2' O-methyl modified nucleoside - 2' O-methyladenosine
  modified_base 6: mod_base = OTHER; note = 2' fluoro-modified nucleoside - 2' fluoroadenosine
  modified_base 7: mod_base = OTHER; note = 2' O-methyl modified nucleoside - 2' O-methyluridine
  modified_base 8: mod_base = OTHER; note = 2' fluoro-modified nucleoside - 2' fluorouridine
  modified_base 9: mod_base = OTHER; note = 2' O-methyl modified nucleoside - 2' O-methylguanosine
  modified_base 10: mod_base = OTHER; note = 2' fluoro-modified nucleoside - 2' fluoroadenosine
  modified_base 11: mod_base = OTHER; note = 2' O-methyl modified nucleoside - 2' O-methylguanosine
  modified_base 12: mod_base = OTHER; note = 2' O-methyl modified nucleoside - 2' O-methyluridine
  modified_base 13: mod_base = OTHER; note = 2' O-methyl modified nucleoside - 2' O-methylguanosine
  modified_base 14: mod_base = OTHER; note = 2' fluoro-modified nucleoside - 2' fluoroadenosine
  modified_base 15: mod_base = OTHER; note = 2' O-methyl modified nucleoside - 2' O-methyladenosine
  modified_base 16: mod_base = OTHER; note = 2' fluoro-modified nucleoside - 2' fluoroadenosine
  modified_base 17: mod_base = OTHER; note = 2' O-methyl modified nucleoside - 2' O-methylguanosine
  modified_base 18: mod_base = OTHER; note = 2' fluoro-modified nucleoside - 2' fluoroguanosine
  modified_base 19: mod_base = OTHER; note = 2' O-methyl modified nucleoside - 2' O-methylguanosine phosphorothioate linkage
  modified_base 20: mod_base = OTHER; note = 2' O-methyl modified nucleoside - 2' O-methyluridine phosphorothioate linkage
  modified_base 21: mod_base = OTHER; note = 2' O-methyl modified nucleoside - 2' O-methyluridine
tgagaattgagtgaaagggtt

SEQ ID NO: 26119 - RNA, 21 nt, synthetic construct
  source 1..21: mol_type = other RNA; note = Description of Artificial Sequence: Synthetic oligonucleotide
  modified_base 1: mod_base = OTHER; note = 2' O-methyl modified nucleoside - 2' O-methyluridine phosphorothioate linkage
  modified_base 2: mod_base = OTHER; note = 2' fluoro-modified nucleoside - 2' fluoroguanosine phosphorothioate linkage
  modified_base 3: mod_base = OTHER; note = 2' O-methyl modified nucleoside - 2' O-methyluridine
  modified_base 4: mod_base = OTHER; note = 2' fluoro-modified nucleoside - 2' fluorouridine
  modified_base 5: mod_base = OTHER; note = 2' O-methyl modified nucleoside - 2' O-methyluridine
  modified_base 6: mod_base = OTHER; note = 2' fluoro-modified nucleoside - 2' fluoroadenosine
  modified_base 7: mod_base = OTHER; note = 2' O-methyl modified nucleoside - 2' O-methylcytidine
  modified_base 8: mod_base = OTHER; note = 2' fluoro-modified nucleoside - 2' fluoroguanosine
  modified_base 9: mod_base = OTHER; note = 2' O-methyl modified nucleoside - 2' O-methyladenosine
  modified_base 10: mod_base = OTHER; note = 2' fluoro-modified nucleoside - 2' fluoroguanosine
  modified_base 11: mod_base = OTHER; note = 2' O-methyl modified nucleoside - 2' O-methyladenosine
  modified_base 12: mod_base = OTHER; note = 2' O-methyl modified nucleoside - 2' O-methyladenosine
  modified_base 13: mod_base = OTHER; note = 2' O-methyl modified nucleoside - 2' O-methyladenosine
  modified_base 14: mod_base = OTHER; note = 2' fluoro-modified nucleoside - 2' fluoroadenosine
  modified_base 15: mod_base = OTHER; note = 2' O-methyl modified nucleoside - 2' O-methylguanosine
  modified_base 16: mod_base = OTHER; note = 2' fluoro-modified nucleoside - 2' fluoroguanosine
  modified_base 17: mod_base = OTHER; note = 2' O-methyl modified nucleoside - 2' O-methyladenosine
  modified_base 18: mod_base = OTHER; note = 2' fluoro-modified nucleoside - 2' fluoroguanosine
  modified_base 19: mod_base = OTHER; note = 2' O-methyl modified nucleoside - 2' O-methyladenosine phosphorothioate linkage
  modified_base 20: mod_base = OTHER; note = 2' O-methyl modified nucleoside - 2' O-methyluridine phosphorothioate linkage
  modified_base 21: mod_base = OTHER; note = 2' O-methyl modified nucleoside - 2' O-methyluridine
tgtttacgagaaaaggagatt

SEQ ID NO: 26120 - RNA, 21 nt, synthetic construct
  source 1..21: mol_type = other RNA; note = Description of Artificial Sequence: Synthetic oligonucleotide
  modified_base 1: mod_base = OTHER; note = 2' O-methyl modified nucleoside - 2' O-methyluridine phosphorothioate linkage
  modified_base 2: mod_base = OTHER; note = 2' fluoro-modified nucleoside - 2' fluoroadenosine phosphorothioate linkage
  modified_base 3: mod_base = OTHER; note = 2' O-methyl modified nucleoside - 2' O-methylguanosine
  modified_base 4: mod_base = OTHER; note = 2' fluoro-modified nucleoside - 2' fluorouridine
  modified_base 5: mod_base = OTHER; note = 2' O-methyl modified nucleoside - 2' O-methyluridine
  modified_base 6: mod_base = OTHER; note = 2' fluoro-modified nucleoside - 2' fluorouridine
  modified_base 7: mod_base = OTHER; note = 2' O-methyl modified nucleoside - 2' O-methyladenosine
  modified_base 8: mod_base = OTHER; note = 2' fluoro-modified nucleoside - 2' fluorocytidine
  modified_base 9: mod_base = OTHER; note = 2' O-methyl modified nucleoside - 2' O-methylguanosine
  modified_base 10: mod_base = OTHER; note = 2' fluoro-modified nucleoside - 2' fluoroadenosine
  modified_base 11: mod_base = OTHER; note = 2' O-methyl modified nucleoside - 2' O-methylguanosine
  modified_base 12: mod_base = OTHER; note = 2' O-methyl modified nucleoside - 2' O-methyladenosine
  modified_base 13: mod_base = OTHER; note = 2' O-methyl modified nucleoside - 2' O-methyladenosine
  modified_base 14: mod_base = OTHER; note = 2' fluoro-modified nucleoside - 2' fluoroadenosine
  modified_base 15: mod_base = OTHER; note = 2' O-methyl modified nucleoside - 2' O-methyladenosine
  modified_base 16: mod_base = OTHER; note = 2' fluoro-modified nucleoside - 2' fluoroguanosine
  modified_base 17: mod_base = OTHER; note = 2' O-methyl modified nucleoside - 2' O-methylguanosine
  modified_base 18: mod_base = OTHER; note = 2' fluoro-modified nucleoside - 2' fluoroadenosine
  modified_base 19: mod_base = OTHER; note = 2' O-methyl modified nucleoside - 2' O-methylguanosine phosphorothioate linkage
  modified_base 20: mod_base = OTHER; note = 2' O-methyl modified nucleoside - 2' O-methyluridine phosphorothioate linkage
  modified_base 21: mod_base = OTHER; note = 2' O-methyl modified nucleoside - 2' O-methyluridine
tagtttacgagaaaaggagtt

SEQ ID NO: 26121 - RNA, 21 nt, synthetic construct
  source 1..21: mol_type = other RNA; note = Description of Artificial Sequence: Synthetic oligonucleotide
  modified_base 1: mod_base = OTHER; note = 2' O-methyl modified nucleoside - 2' O-methyluridine phosphorothioate linkage
  modified_base 2: mod_base = OTHER; note = 2' fluoro-modified nucleoside - 2' fluoroadenosine phosphorothioate linkage
  modified_base 3: mod_base = OTHER; note = 2' O-methyl modified nucleoside - 2' O-methyladenosine
  modified_base 4: mod_base = OTHER; note = 2' fluoro-modified nucleoside - 2' fluoroguanosine
  modified_base 5: mod_base = OTHER; note = 2' O-methyl modified nucleoside - 2' O-methyluridine
  modified_base 6: mod_base = OTHER; note = 2' fluoro-modified nucleoside - 2' fluorouridine
  modified_base 7: mod_base = OTHER; note = 2' O-methyl modified nucleoside - 2' O-methyluridine
  modified_base 8: mod_base = OTHER; note = 2' fluoro-modified nucleoside - 2' fluoroadenosine
  modified_base 9: mod_base = OTHER; note = 2' O-methyl modified nucleoside - 2' O-methylcytidine
  modified_base 10: mod_base = OTHER; note = 2' fluoro-modified nucleoside - 2' fluoroguanosine
  modified_base 11: mod_base = OTHER; note = 2' O-methyl modified nucleoside - 2' O-methyladenosine
  modified_base 12: mod_base = OTHER; note = 2' O-methyl modified nucleoside - 2' O-methylguanosine
  modified_base 13: mod_base = OTHER; note = 2' O-methyl modified nucleoside - 2' O-methyladenosine
  modified_base 14: mod_base = OTHER; note = 2' fluoro-modified nucleoside - 2' fluoroadenosine
  modified_base 15: mod_base = OTHER; note = 2' O-methyl modified nucleoside - 2' O-methyladenosine
  modified_base 16: mod_base = OTHER; note = 2' fluoro-modified nucleoside - 2' fluoroadenosine
  modified_base 17: mod_base = OTHER; note = 2' O-methyl modified nucleoside - 2' O-methylguanosine
  modified_base 18: mod_base = OTHER; note = 2' fluoro-modified nucleoside - 2' fluoroguanosine
  modified_base 19: mod_base = OTHER; note = 2' O-methyl modified nucleoside - 2' O-methyladenosine phosphorothioate linkage
  modified_base 20: mod_base = OTHER; note = 2' O-methyl modified nucleoside - 2' O-methyluridine phosphorothioate linkage
  modified_base 21: mod_base = OTHER; note = 2' O-methyl modified nucleoside - 2' O-methyluridine
taagtttacgagaaaaggatt

SEQ ID NO: 26122 - RNA, 21 nt, synthetic construct
  source 1..21: mol_type = other RNA; note = Description of Artificial Sequence: Synthetic oligonucleotide
  modified_base 1: mod_base = OTHER; note = 2' O-methyl modified nucleoside - 2' O-methyluridine phosphorothioate linkage
  modified_base 2: mod_base = OTHER; note = 2' fluoro-modified nucleoside - 2' fluorocytidine phosphorothioate linkage
  modified_base 3: mod_base = OTHER; note = 2' O-methyl modified nucleoside - 2' O-methyladenosine
  modified_base 4: mod_base = OTHER; note = 2' fluoro-modified nucleoside - 2' fluoroadenosine
  modified_base 5: mod_base = OTHER; note = 2' O-methyl modified nucleoside - 2' O-methyladenosine
  modified_base 6: mod_base = OTHER; note = 2' fluoro-modified nucleoside - 2' fluoroguanosine
  modified_base 7: mod_base = OTHER; note = 2' O-methyl modified nucleoside - 2' O-methyluridine
  modified_base 8: mod_base = OTHER; note = 2' fluoro-modified nucleoside - 2' fluorouridine
  modified_base 9: mod_base = OTHER; note = 2' O-methyl modified nucleoside - 2' O-methyluridine
  modified_base 10: mod_base = OTHER; note = 2' fluoro-modified nucleoside - 2' fluoroadenosine
  modified_base 11: mod_base = OTHER; note = 2' O-methyl modified nucleoside - 2' O-methylcytidine
  modified_base 12: mod_base = OTHER; note = 2' O-methyl modified nucleoside - 2' O-methylguanosine
  modified_base 13: mod_base = OTHER; note = 2' O-methyl modified nucleoside - 2' O-methyladenosine
  modified_base 14: mod_base = OTHER; note = 2' fluoro-modified nucleoside - 2' fluoroguanosine
  modified_base 15: mod_base = OTHER; note = 2' O-methyl modified nucleoside - 2' O-methyladenosine
  modified_base 16: mod_base = OTHER; note = 2' fluoro-modified nucleoside - 2' fluoroadenosine
  modified_base 17: mod_base = OTHER; note = 2' O-methyl modified nucleoside - 2' O-methyladenosine
  modified_base 18: mod_base = OTHER; note = 2' fluoro-modified nucleoside - 2' fluoroadenosine
  modified_base 19: mod_base = OTHER; note = 2' O-methyl modified nucleoside - 2' O-methylguanosine phosphorothioate linkage
  modified_base 20: mod_base = OTHER; note = 2' O-methyl modified nucleoside - 2' O-methyluridine phosphorothioate linkage
  modified_base 21: mod_base = OTHER; note = 2' O-methyl modified nucleoside - 2' O-methyluridine
tcaaagtttacgagaaaagtt

SEQ ID NO: 26123 - RNA, 21 nt, synthetic construct
  source 1..21: mol_type = other RNA; note = Description of Artificial Sequence: Synthetic oligonucleotide
  modified_base 1: mod_base = OTHER; note = 2' O-methyl modified nucleoside - 2' O-methyluridine phosphorothioate linkage
  modified_base 2: mod_base = OTHER; note = 2' fluoro-modified nucleoside - 2' fluoroguanosine phosphorothioate linkage
  modified_base 3: mod_base = OTHER; note = 2' O-methyl modified nucleoside - 2' O-methylcytidine
  modified_base 4: mod_base = OTHER; note = 2' fluoro-modified nucleoside - 2' fluoroadenosine
  modified_base 5: mod_base = OTHER; note = 2' O-methyl modified nucleoside - 2' O-methyladenosine
  modified_base 6: mod_base = OTHER; note = 2' fluoro-modified nucleoside - 2' fluoroadenosine
  modified_base 7: mod_base = OTHER; note = 2' O-methyl modified nucleoside - 2' O-methylguanosine
  modified_base 8: mod_base = OTHER; note = 2' fluoro-modified nucleoside - 2' fluorouridine
  modified_base 9: mod_base = OTHER; note = 2' O-methyl modified nucleoside - 2' O-methyluridine
  modified_base 10: mod_base = OTHER; note = 2' fluoro-modified nucleoside - 2' fluorouridine
  modified_base 11: mod_base = OTHER; note = 2' O-methyl modified nucleoside - 2' O-methyladenosine
  modified_base 12: mod_base = OTHER; note = 2' O-methyl modified nucleoside - 2' O-methylcytidine
  modified_base 13: mod_base = OTHER; note = 2' O-methyl modified nucleoside - 2' O-methylguanosine
  modified_base 14: mod_base = OTHER; note = 2' fluoro-modified nucleoside - 2' fluoroadenosine
  modified_base 15: mod_base = OTHER; note = 2' O-methyl modified nucleoside - 2' O-methylguanosine
  modified_base 16: mod_base = OTHER; note = 2' fluoro-modified nucleoside - 2' fluoroadenosine
  modified_base 17: mod_base = OTHER; note = 2' O-methyl modified nucleoside - 2' O-methyladenosine
  modified_base 18: mod_base = OTHER; note = 2' fluoro-modified nucleoside - 2' fluoroadenosine
  modified_base 19: mod_base = OTHER; note = 2' O-methyl modified nucleoside - 2' O-methyladenosine phosphorothioate linkage
  modified_base 20: mod_base = OTHER; note = 2' O-methyl modified nucleoside - 2' O-methyluridine phosphorothioate linkage
  modified_base 21: mod_base = OTHER; note = 2' O-methyl modified nucleoside - 2' O-methyluridine
tgcaaagtttacgagaaaatt

SEQ ID NO: 26124 - RNA, 21 nt, synthetic construct
  source 1..21: mol_type = other RNA; note = Description of Artificial Sequence: Synthetic oligonucleotide
  modified_base 1: mod_base = OTHER; note = 2' O-methyl modified nucleoside - 2' O-methyluridine phosphorothioate linkage
  modified_base 2: mod_base = OTHER; note = 2' fluoro-modified nucleoside - 2' fluorocytidine phosphorothioate linkage
  modified_base 3: mod_base = OTHER; note = 2' O-methyl modified nucleoside - 2' O-methylguanosine
  modified_base 4: mod_base = OTHER; note = 2' fluoro-modified nucleoside - 2' fluoroguanosine
  modified_base 5: mod_base = OTHER; note = 2' O-methyl modified nucleoside - 2' O-methylcytidine
  modified_base 6: mod_base = OTHER; note = 2' fluoro-modified nucleoside - 2' fluoroadenosine
  modified_base 7: mod_base = OTHER; note = 2' O-methyl modified nucleoside - 2' O-methyladenosine
  modified_base 8: mod_base = OTHER; note = 2' fluoro-modified nucleoside - 2' fluoroadenosine
  modified_base 9: mod_base = OTHER; note = 2' O-methyl modified nucleoside - 2' O-methylguanosine
  modified_base 10: mod_base = OTHER; note = 2' fluoro-modified nucleoside - 2' fluorouridine
  modified_base 11: mod_base = OTHER; note = 2' O-methyl modified nucleoside - 2' O-methyluridine
  modified_base 12: mod_base = OTHER; note = 2' O-methyl modified nucleoside - 2' O-methyluridine
  modified_base 13: mod_base = OTHER; note = 2' O-methyl modified nucleoside - 2' O-methyladenosine
  modified_base 14: mod_base = OTHER; note = 2' fluoro-modified nucleoside - 2' fluorocytidine
  modified_base 15: mod_base = OTHER; note = 2' O-methyl modified nucleoside - 2' O-methylguanosine
  modified_base 16: mod_base = OTHER; note = 2' fluoro-modified nucleoside - 2' fluoroadenosine
  modified_base 17: mod_base = OTHER; note = 2' O-methyl modified nucleoside - 2' O-methylguanosine
  modified_base 18: mod_base = OTHER; note = 2' fluoro-modified nucleoside - 2' fluoroadenosine
  modified_base 19: mod_base = OTHER; note = 2' O-methyl modified nucleoside - 2' O-methyladenosine phosphorothioate linkage
  modified_base 20: mod_base = OTHER; note = 2' O-methyl modified nucleoside - 2' O-methyluridine phosphorothioate linkage
  modified_base 21: mod_base = OTHER; note = 2' O-methyl modified nucleoside - 2' O-methyluridine
tcggcaaagtttacgagaatt

SEQ ID NO: 26125 - RNA, 21 nt, synthetic construct
  source 1..21: mol_type = other RNA; note = Description of Artificial Sequence: Synthetic oligonucleotide
  modified_base 1: mod_base = OTHER; note = 2' O-methyl modified nucleoside - 2' O-methyluridine phosphorothioate linkage
  modified_base 2: mod_base = OTHER; note = 2' fluoro-modified nucleoside - 2' fluoroguanosine phosphorothioate linkage
  modified_base 3: mod_base = OTHER; note = 2' O-methyl modified nucleoside - 2' O-methylcytidine
  modified_base 4: mod_base = OTHER; note = 2' fluoro-modified nucleoside - 2' fluoroguanosine
  modified_base 5: mod_base = OTHER; note = 2' O-methyl modified nucleoside - 2' O-methylguanosine
  modified_base 6: mod_base = OTHER; note = 2' fluoro-modified nucleoside - 2' fluorocytidine
  modified_base 7: mod_base = OTHER; note = 2' O-methyl modified nucleoside - 2' O-methyladenosine
  modified_base 8: mod_base = OTHER; note = 2' fluoro-modified nucleoside - 2' fluoroadenosine
  modified_base 9: mod_base = OTHER; note = 2' O-methyl modified nucleoside - 2' O-methyladenosine
  modified_base 10: mod_base = OTHER; note = 2' fluoro-modified nucleoside - 2' fluoroguanosine
  modified_base 11: mod_base = OTHER; note = 2' O-methyl modified nucleoside - 2' O-methyluridine
  modified_base 12: mod_base = OTHER; note = 2' O-methyl modified nucleoside - 2' O-methyluridine
  modified_base 13: mod_base = OTHER; note = 2' O-methyl modified nucleoside - 2' O-methyluridine
  modified_base 14: mod_base = OTHER; note = 2' fluoro-modified nucleoside - 2' fluoroadenosine
  modified_base 15: mod_base = OTHER; note = 2' O-methyl modified nucleoside - 2' O-methylcytidine
  modified_base 16: mod_base = OTHER; note = 2' fluoro-modified nucleoside - 2' fluoroguanosine
  modified_base 17: mod_base = OTHER; note = 2' O-methyl modified nucleoside - 2' O-methyladenosine
  modified_base 18: mod_base = OTHER; note = 2' fluoro-modified nucleoside - 2' fluoroguanosine
  modified_base 19: mod_base = OTHER; note = 2' O-methyl modified nucleoside - 2' O-methyladenosine phosphorothioate linkage
  modified_base 20: mod_base = OTHER; note = 2' O-methyl modified nucleoside - 2' O-methyluridine phosphorothioate linkage
  modified_base 21: mod_base = OTHER; note = 2' O-methyl modified nucleoside - 2' O-methyluridine
tgcggcaaagtttacgagatt

SEQ ID NO: 26126 - RNA, 21 nt, synthetic construct
  source 1..21: mol_type = other RNA; note = Description of Artificial Sequence: Synthetic oligonucleotide
  modified_base 1: mod_base = OTHER; note = 2' O-methyl modified nucleoside - 2' O-methyluridine phosphorothioate linkage
  modified_base 2: mod_base = OTHER; note = 2' fluoro-modified nucleoside - 2' fluoroguanosine phosphorothioate linkage
  modified_base 3: mod_base = OTHER; note = 2' O-methyl modified nucleoside - 2' O-methylguanosine
  modified_base 4: mod_base = OTHER; note = 2' fluoro-modified nucleoside - 2' fluorocytidine
  modified_base 5: mod_base = OTHER; note = 2' O-methyl modified nucleoside - 2' O-methylguanosine
  modified_base 6: mod_base = OTHER; note = 2' fluoro-modified nucleoside - 2' fluoroguanosine
  modified_base 7: mod_base = OTHER; note = 2' O-methyl modified nucleoside - 2' O-methylcytidine
  modified_base 8: mod_base = OTHER; note = 2' fluoro-modified nucleoside - 2' fluoroadenosine
  modified_base 9: mod_base = OTHER; note = 2' O-methyl modified nucleoside - 2' O-methyladenosine
  modified_base 10: mod_base = OTHER; note = 2' fluoro-modified nucleoside - 2' fluoroadenosine
  modified_base 11: mod_base = OTHER; note = 2' O-methyl modified nucleoside - 2' O-methylguanosine
  modified_base 12: mod_base = OTHER; note = 2' O-methyl modified nucleoside - 2' O-methyluridine
  modified_base 13: mod_base = OTHER; note = 2' O-methyl modified nucleoside - 2' O-methyluridine
  modified_base 14: mod_base = OTHER; note = 2' fluoro-modified nucleoside - 2' fluorouridine
  modified_base 15: mod_base = OTHER; note = 2' O-methyl modified nucleoside - 2' O-methyladenosine
  modified_base 16: mod_base = OTHER; note = 2' fluoro-modified nucleoside - 2' fluorocytidine
  modified_base 17: mod_base = OTHER; note = 2' O-methyl modified nucleoside - 2' O-methylguanosine
  modified_base 18: mod_base = OTHER; note = 2' fluoro-modified nucleoside - 2' fluoroadenosine
  modified_base 19: mod_base = OTHER; note = 2' O-methyl modified nucleoside - 2' O-methylguanosine phosphorothioate linkage
  modified_base 20: mod_base = OTHER; note = 2' O-methyl modified nucleoside - 2' O-methyluridine phosphorothioate linkage
  modified_base 21: mod_base = OTHER; note = 2' O-methyl modified nucleoside - 2' O-methyluridine
tggcggcaaagtttacgagtt

SEQ ID NO: 26127 - RNA, 21 nt, synthetic construct
  source 1..21: mol_type = other RNA; note = Description of Artificial Sequence: Synthetic oligonucleotide
  modified_base 1: mod_base = OTHER; note = 2' O-methyl modified nucleoside - 2' O-methyluridine phosphorothioate linkage
  modified_base 2: mod_base = OTHER; note = 2' fluoro-modified nucleoside - 2' fluoroadenosine phosphorothioate linkage
  modified_base 3: mod_base = OTHER; note = 2' O-methyl modified nucleoside - 2' O-methylguanosine
  modified_base 4: mod_base = OTHER; note = 2' fluoro-modified nucleoside - 2' fluoroguanosine
  modified_base 5: mod_base = OTHER; note = 2' O-methyl modified nucleoside - 2' O-methylcytidine
  modified_base 6: mod_base = OTHER; note = 2' fluoro-modified nucleoside - 2' fluoroguanosine
  modified_base 7: mod_base = OTHER; note = 2' O-methyl modified nucleoside - 2' O-methylguanosine
  modified_base 8: mod_base = OTHER; note = 2' fluoro-modified nucleoside - 2' fluorocytidine
  modified_base 9: mod_base = OTHER; note = 2' O-methyl modified nucleoside - 2' O-methyladenosine
  modified_base 10: mod_base = OTHER; note = 2' fluoro-modified nucleoside - 2' fluoroadenosine
  modified_base 11: mod_base = OTHER; note = 2' O-methyl modified nucleoside - 2' O-methyladenosine
  modified_base 12: mod_base = OTHER; note = 2' O-methyl modified nucleoside - 2' O-methylguanosine
  modified_base 13: mod_base = OTHER; note = 2' O-methyl modified nucleoside - 2' O-methyluridine
  modified_base 14: mod_base = OTHER; note = 2' fluoro-modified nucleoside - 2' fluorouridine
  modified_base 15: mod_base = OTHER; note = 2' O-methyl modified nucleoside - 2' O-methyluridine
  modified_base 16: mod_base = OTHER; note = 2' fluoro-modified nucleoside - 2' fluoroadenosine
  modified_base 17: mod_base = OTHER; note = 2' O-methyl modified nucleoside - 2' O-methylcytidine
  modified_base 18: mod_base = OTHER; note = 2' fluoro-modified nucleoside - 2' fluoroguanosine
  modified_base 19: mod_base = OTHER; note = 2' O-methyl modified nucleoside - 2' O-methyladenosine phosphorothioate linkage
  modified_base 20: mod_base = OTHER; note = 2' O-methyl modified nucleoside - 2' O-methyluridine phosphorothioate linkage
  modified_base 21: mod_base = OTHER; note = 2' O-methyl modified nucleoside - 2' O-methyluridine
taggcggcaaagtttacgatt

SEQ ID NO: 26128 - RNA, 21 nt, synthetic construct
  source 1..21: mol_type = other RNA; note = Description of Artificial Sequence: Synthetic oligonucleotide
  modified_base 1: mod_base = OTHER; note = 2' O-methyl modified nucleoside - 2' O-methyluridine phosphorothioate linkage
  modified_base 2: mod_base = OTHER; note = 2' fluoro-modified nucleoside - 2' fluoroadenosine phosphorothioate linkage
  modified_base 3: mod_base = OTHER; note = 2' O-methyl modified nucleoside - 2' O-methyluridine
  modified_base 4: mod_base = OTHER; note = 2' fluoro-modified nucleoside - 2' fluoroadenosine
  modified_base 5: mod_base = OTHER; note = 2' O-methyl modified nucleoside - 2' O-methylguanosine
  modified_base 6: mod_base = OTHER; note = 2' fluoro-modified nucleoside - 2' fluoroguanosine
  modified_base 7: mod_base = OTHER; note = 2' O-methyl modified nucleoside - 2' O-methylcytidine
  modified_base 8: mod_base = OTHER; note = 2' fluoro-modified nucleoside - 2' fluoroguanosine
  modified_base 9: mod_base = OTHER; note = 2' O-methyl modified nucleoside - 2' O-methylguanosine
  modified_base 10: mod_base = OTHER; note = 2' fluoro-modified nucleoside - 2' fluorocytidine
  modified_base 11: mod_base = OTHER; note = 2' O-methyl modified nucleoside - 2' O-methyladenosine
  modified_base 12: mod_base = OTHER; note = 2' O-methyl modified nucleoside - 2' O-methyladenosine
  modified_base 13: mod_base = OTHER; note = 2' O-methyl modified nucleoside - 2' O-methyladenosine
  modified_base 14: mod_base = OTHER; note = 2' fluoro-modified nucleoside - 2' fluoroguanosine
  modified_base 15: mod_base = OTHER; note = 2' O-methyl modified nucleoside - 2' O-methyluridine
  modified_base 16: mod_base = OTHER; note = 2' fluoro-modified nucleoside - 2' fluorouridine
  modified_base 17: mod_base = OTHER; note = 2' O-methyl modified nucleoside - 2' O-methyluridine
  modified_base 18: mod_base = OTHER; note = 2' fluoro-modified nucleoside - 2' fluoroadenosine
  modified_base 19: mod_base = OTHER; note = 2' O-methyl modified nucleoside - 2' O-methylcytidine phosphorothioate linkage
  modified_base 20: mod_base = OTHER; note = 2' O-methyl modified nucleoside - 2' O-methyluridine phosphorothioate linkage
  modified_base 21: mod_base = OTHER; note = 2' O-methyl modified nucleoside - 2' O-methyluridine
tataggcggcaaagtttactt

SEQ ID NO: 26129 - RNA, 21 nt, synthetic construct
  source 1..21: mol_type = other RNA; note = Description of Artificial Sequence: Synthetic oligonucleotide
  modified_base 1: mod_base = OTHER; note = 2' O-methyl modified nucleoside - 2' O-methyluridine phosphorothioate linkage
  modified_base 2: mod_base = OTHER; note = 2' fluoro-modified nucleoside - 2' fluorocytidine phosphorothioate linkage
  modified_base 3: mod_base = OTHER; note = 2' O-methyl modified nucleoside - 2' O-methyladenosine
  modified_base 4: mod_base = OTHER; note = 2' fluoro-modified nucleoside - 2' fluorouridine
  modified_base 5: mod_base = OTHER; note = 2' O-methyl modified nucleoside - 2' O-methyladenosine
  modified_base 6: mod_base = OTHER; note = 2' fluoro-modified nucleoside - 2' fluoroguanosine
  modified_base 7: mod_base = OTHER; note = 2' O-methyl modified nucleoside - 2' O-methylguanosine
  modified_base 8: mod_base = OTHER; note = 2' fluoro-modified nucleoside - 2' fluorocytidine
  modified_base 9: mod_base = OTHER; note = 2' O-methyl modified nucleoside - 2' O-methylguanosine
  modified_base 10: mod_base = OTHER; note = 2' fluoro-modified nucleoside - 2' fluoroguanosine
  modified_base 11: mod_base = OTHER; note = 2' O-methyl modified nucleoside - 2' O-methylcytidine
  modified_base 12: mod_base = OTHER; note = 2' O-methyl modified nucleoside - 2' O-methyladenosine
  modified_base 13: mod_base = OTHER; note = 2' O-methyl modified nucleoside - 2' O-methyladenosine
  modified_base 14: mod_base = OTHER; note = 2' fluoro-modified nucleoside - 2' fluoroadenosine
  modified_base 15: mod_base = OTHER; note = 2' O-methyl modified nucleoside - 2' O-methylguanosine
  modified_base 16: mod_base = OTHER; note = 2' fluoro-modified nucleoside - 2' fluorouridine
  modified_base 17: mod_base = OTHER; note = 2' O-methyl modified nucleoside - 2' O-methyluridine
  modified_base 18: mod_base = OTHER; note = 2' fluoro-modified nucleoside - 2' fluorouridine
  modified_base 19: mod_base = OTHER; note = 2' O-methyl modified nucleoside - 2' O-methyladenosine phosphorothioate linkage
  modified_base 20: mod_base = OTHER; note = 2' O-methyl modified nucleoside - 2' O-methyluridine phosphorothioate linkage
  modified_base 21: mod_base = OTHER; note = 2' O-methyl modified nucleoside - 2' O-methyluridine
tcataggcggcaaagtttatt

SEQ ID NO: 26130 - RNA, 21 nt, synthetic construct
  source 1..21: mol_type = other RNA; note = Description of Artificial Sequence: Synthetic oligonucleotide
  modified_base 1: mod_base = OTHER; note = 2' O-methyl modified nucleoside - 2' O-methyluridine phosphorothioate linkage
  modified_base 2: mod_base = OTHER; note = 2' fluoro-modified nucleoside - 2' fluorocytidine phosphorothioate linkage
  modified_base 3: mod_base = OTHER; note = 2' O-methyl modified nucleoside - 2' O-methyluridine
  modified_base 4: mod_base = OTHER; note = 2' fluoro-modified nucleoside - 2' fluorocytidine
  modified_base 5: mod_base = OTHER; note = 2' O-methyl modified nucleoside - 2' O-methyladenosine
  modified_base 6: mod_base = OTHER; note = 2' fluoro-modified nucleoside - 2' fluorouridine
  modified_base 7: mod_base = OTHER; note = 2' O-methyl modified nucleoside - 2' O-methyladenosine
  modified_base 8: mod_base = OTHER; note = 2' fluoro-modified nucleoside - 2' fluoroguanosine
  modified_base 9: mod_base = OTHER; note = 2' O-methyl modified nucleoside - 2' O-methylguanosine
  modified_base 10: mod_base = OTHER; note = 2' fluoro-modified nucleoside - 2' fluorocytidine
  modified_base 11: mod_base = OTHER; note = 2' O-methyl modified nucleoside - 2' O-methylguanosine
  modified_base 12: mod_base = OTHER; note = 2' O-methyl modified nucleoside - 2' O-methylguanosine
  modified_base 13: mod_base = OTHER; note = 2' O-methyl modified nucleoside - 2' O-methylcytidine
  modified_base 14: mod_base = OTHER; note = 2' fluoro-modified nucleoside - 2' fluoroadenosine
  modified_base 15: mod_base = OTHER; note = 2' O-methyl modified nucleoside - 2' O-methyladenosine
  modified_base 16: mod_base = OTHER; note = 2' fluoro-modified nucleoside - 2' fluoroadenosine
  modified_base 17: mod_base = OTHER; note = 2' O-methyl modified nucleoside - 2' O-methylguanosine
  modified_base 18: mod_base = OTHER; note = 2' fluoro-modified nucleoside - 2' fluorouridine
  modified_base 19: mod_base = OTHER; note = 2' O-methyl modified nucleoside - 2' O-methyluridine phosphorothioate linkage
  modified_base 20: mod_base = OTHER; note = 2' O-methyl modified nucleoside - 2' O-methyluridine phosphorothioate linkage
  modified_base 21: mod_base = OTHER; note = 2' O-methyl modified nucleoside - 2' O-methyluridine
tctcataggcggcaaagtttt

SEQ ID NO: 26131 - RNA, 21 nt, synthetic construct
  source 1..21: mol_type = other RNA; note = Description of Artificial Sequence: Synthetic oligonucleotide
  modified_base 1: mod_base = OTHER; note = 2' O-methyl modified nucleoside - 2' O-methyluridine phosphorothioate linkage
  modified_base 2: mod_base = OTHER; note = 2' fluoro-modified nucleoside - 2' fluorouridine phosphorothioate linkage
  modified_base 3: mod_base = OTHER; note = 2' O-methyl modified nucleoside - 2' O-methylguanosine
  modified_base 4: mod_base = OTHER; note = 2' fluoro-modified nucleoside - 2' fluorouridine
  modified_base 5: mod_base = OTHER; note = 2' O-methyl modified nucleoside - 2' O-methylguanosine
  modified_base 6: mod_base = OTHER; note = 2' fluoro-modified nucleoside - 2' fluoroguanosine
  modified_base 7: mod_base = OTHER; note = 2' O-methyl modified nucleoside - 2' O-methylcytidine
  modified_base 8: mod_base = OTHER; note = 2' fluoro-modified nucleoside - 2' fluorouridine
  modified_base 9: mod_base = OTHER; note = 2' O-methyl modified nucleoside - 2' O-methylguanosine
  modified_base 10: mod_base = OTHER; note = 2' fluoro-modified nucleoside - 2' fluorocytidine
  modified_base 11: mod_base = OTHER; note = 2' O-methyl modified nucleoside - 2' O-methyluridine
  modified_base 12: mod_base = OTHER; note = 2' O-methyl modified nucleoside - 2' O-methylcytidine
  modified_base 13: mod_base = OTHER; note = 2' O-methyl modified nucleoside - 2' O-methyladenosine
  modified_base 14: mod_base = OTHER; note = 2' fluoro-modified nucleoside - 2' fluorouridine
  modified_base 15: mod_base = OTHER; note = 2' O-methyl modified nucleoside - 2' O-methyladenosine
  modified_base 16: mod_base = OTHER; note = 2' fluoro-modified nucleoside - 2' fluoroguanosine
  modified_base 17: mod_base = OTHER; note = 2' O-methyl modified nucleoside - 2' O-methylguanosine
  modified_base 18: mod_base = OTHER; note = 2' fluoro-modified nucleoside - 2' fluorocytidine
  modified_base 19: mod_base = OTHER; note = 2' O-methyl modified nucleoside - 2' O-methylguanosine phosphorothioate linkage
  modified_base 20: mod_base = OTHER; note = 2' O-methyl modified nucleoside - 2' O-methyluridine phosphorothioate linkage
  modified_base 21: mod_base = OTHER; note = 2' O-methyl modified nucleoside - 2' O-methyluridine
ttgtggctgctcataggcgtt

SEQ ID NO: 26132 - RNA, 21 nt, synthetic construct
  source 1..21: mol_type = other RNA; note = Description of Artificial Sequence: Synthetic oligonucleotide
  modified_base 1: mod_base = OTHER; note = 2' O-methyl modified nucleoside - 2' O-methyluridine phosphorothioate linkage
  modified_base 2: mod_base = OTHER; note = 2' fluoro-modified nucleoside - 2' fluorocytidine phosphorothioate linkage
  modified_base 3: mod_base = OTHER; note = 2' O-methyl modified nucleoside - 2' O-methyladenosine
  modified_base 4: mod_base = OTHER; note = 2' fluoro-modified nucleoside - 2' fluoroadenosine
  modified_base 5: mod_base = OTHER; note = 2' O-methyl modified nucleoside - 2' O-methyluridine
  modified_base 6: mod_base = OTHER; note = 2' fluoro-modified nucleoside - 2' fluoroguanosine
  modified_base 7: mod_base = OTHER; note = 2' O-methyl modified nucleoside - 2' O-methyluridine
  modified_base 8: mod_base = OTHER; note = 2' fluoro-modified nucleoside - 2' fluoroguanosine
  modified_base 9: mod_base = OTHER; note = 2' O-methyl modified nucleoside - 2' O-methylguanosine
  modified_base 10: mod_base = OTHER; note = 2' fluoro-modified nucleoside - 2' fluorocytidine
  modified_base 11: mod_base = OTHER; note = 2' O-methyl modified nucleoside - 2' O-methyluridine
  modified_base 12: mod_base = OTHER; note = 2' O-methyl modified nucleoside - 2' O-methylguanosine
  modified_base 13: mod_base = OTHER; note = 2' O-methyl modified nucleoside - 2' O-methylcytidine
  modified_base 14: mod_base = OTHER; note = 2' fluoro-modified nucleoside - 2' fluorouridine
  modified_base 15: mod_base = OTHER; note = 2' O-methyl modified nucleoside - 2' O-methylcytidine
  modified_base 16: mod_base = OTHER; note = 2' fluoro-modified nucleoside - 2' fluoroadenosine
  modified_base 17: mod_base = OTHER; note = 2' O-methyl modified nucleoside - 2' O-methyluridine
  modified_base 18: mod_base = OTHER; note = 2' fluoro-modified nucleoside - 2' fluoroadenosine
  modified_base 19: mod_base = OTHER; note = 2' O-methyl modified nucleoside - 2' O-methylguanosine phosphorothioate linkage
  modified_base 20: mod_base = OTHER; note = 2' O-methyl modified nucleoside - 2' O-methyluridine phosphorothioate linkage
  modified_base 21: mod_base = OTHER; note = 2' O-methyl modified nucleoside - 2' O-methyluridine
tcaatgtggctgctcatagtt

SEQ ID NO: 26133 - RNA, 21 nt, synthetic construct
  source 1..21: mol_type = other RNA; note = Description of Artificial Sequence: Synthetic oligonucleotide
  modified_base 1: mod_base = OTHER; note = 2' O-methyl modified nucleoside - 2' O-methyluridine phosphorothioate linkage
  modified_base 2: mod_base = OTHER; note = 2' fluoro-modified nucleoside - 2' fluoroguanosine phosphorothioate linkage
  modified_base 3: mod_base = OTHER; note = 2' O-methyl modified nucleoside - 2' O-methyluridine
  modified_base 4: mod_base = OTHER; note = 2' fluoro-modified nucleoside - 2' fluoroadenosine
  modified_base 5: mod_base = OTHER; note = 2' O-methyl modified nucleoside - 2' O-methyladenosine
  modified_base 6: mod_base = OTHER; note = 2' fluoro-modified nucleoside - 2' fluoroguanosine
  modified_base 7: mod_base = OTHER; note = 2' O-methyl modified nucleoside - 2' O-methylguanosine
  modified_base 8: mod_base = OTHER; note = 2' fluoro-modified nucleoside - 2' fluorocytidine
  modified_base 9: mod_base = OTHER; note = 2' O-methyl modified nucleoside - 2' O-methyladenosine
  modified_base 10: mod_base = OTHER; note = 2' fluoro-modified nucleoside - 2' fluoroadenosine
  modified_base 11: mod_base = OTHER; note = 2' O-methyl modified nucleoside - 2' O-methyluridine
  modified_base 12: mod_base = OTHER; note = 2' O-methyl modified nucleoside - 2' O-methylguanosine
  modified_base 13: mod_base = OTHER; note = 2' O-methyl modified nucleoside - 2' O-methyluridine
  modified_base 14: mod_base = OTHER; note = 2' fluoro-modified nucleoside - 2' fluoroguanosine
  modified_base 15: mod_base = OTHER; note = 2' O-methyl modified nucleoside - 2' O-methylguanosine
  modified_base 16: mod_base = OTHER; note = 2' fluoro-modified nucleoside - 2' fluorocytidine
  modified_base 17: mod_base = OTHER; note = 2' O-methyl modified nucleoside - 2' O-methyluridine
  modified_base 18: mod_base = OTHER; note = 2' fluoro-modified nucleoside - 2' fluoroguanosine
  modified_base 19: mod_base = OTHER; note = 2' O-methyl modified nucleoside - 2' O-methylcytidine phosphorothioate linkage
  modified_base 20: mod_base = OTHER; note = 2' O-methyl modified nucleoside - 2' O-methyluridine phosphorothioate linkage
  modified_base 21: mod_base = OTHER; note = 2' O-methyl modified nucleoside - 2' O-methyluridine
tgtaaggcaatgtggctgctt

SEQ ID NO: 26134 - RNA, 21 nt, synthetic construct
  source 1..21: mol_type = other RNA; note = Description of Artificial Sequence: Synthetic oligonucleotide
aagttggagtctccctgattt

SEQ ID NO: 26135 - RNA, 22 nt, synthetic construct
  source 1..22: mol_type = other RNA; note = Description of Artificial Sequence: Synthetic oligonucleotide
taagttggagtctccctgatat

SEQ ID NO: 26136 - RNA, 21 nt, synthetic construct
  source 1..21: mol_type = other RNA; note = Description of Artificial Sequence: Synthetic oligonucleotide
ttaagttggagtctccctgat

SEQ ID NO: 26137 - RNA, 21 nt, synthetic construct
  source 1..21: mol_type = other RNA; note = Description of Artificial Sequence: Synthetic oligonucleotide
cttaagttggagtctccctga

SEQ ID NO: 26138 - RNA, 21 nt, synthetic construct
  source 1..21: mol_type = other RNA; note = Description of Artificial Sequence: Synthetic oligonucleotide
ccttaagttggagtctccctg

SEQ ID NO: 26139 - RNA, 21 nt, synthetic construct
  source 1..21: mol_type = other RNA; note = Description of Artificial Sequence: Synthetic oligonucleotide
gccttaagttggagtctccct

SEQ ID NO: 26140 - RNA, 21 nt, synthetic construct
  source 1..21: mol_type = other RNA; note = Description of Artificial Sequence: Synthetic oligonucleotide
tgccttaagttggagtctccc

SEQ ID NO: 26141 - RNA, 21 nt, synthetic construct
  source 1..21: mol_type = other RNA; note = Description of Artificial Sequence: Synthetic oligonucleotide
ttgccttaagttggagtctcc

SEQ ID NO: 26142 - RNA, 21 nt, synthetic construct
  source 1..21: mol_type = other RNA; note = Description of Artificial Sequence: Synthetic oligonucleotide
gttgccttaagttggagtctc

SEQ ID NO: 26143 - RNA, 21 nt, synthetic construct
  source 1..21: mol_type = other RNA; note = Description of Artificial Sequence: Synthetic oligonucleotide
tgttgccttaagttggagtct

SEQ ID NO: 26144 - RNA, 21 nt, synthetic construct
  source 1..21: mol_type = other RNA; note = Description of Artificial Sequence: Synthetic oligonucleotide
ctgttgccttaagttggagtc

SEQ ID NO: 26145 - RNA, 21 nt, synthetic construct
  source 1..21: mol_type = other RNA; note = Description of Artificial Sequence: Synthetic oligonucleotide
gctgttgccttaagttggagt

SEQ ID NO: 26146 - RNA, 21 nt, synthetic construct
  source 1..21: mol_type = other RNA; note = Description of Artificial Sequence: Synthetic oligonucleotide
tgctgttgccttaagttggag

SEQ ID NO: 26147 - RNA, 21 nt, synthetic construct
  source 1..21: mol_type = other RNA; note = Description of Artificial Sequence: Synthetic oligonucleotide
atgctgttgccttaagttgga

SEQ ID NO: 26148 - RNA, 21 nt, synthetic construct
  source 1..21: mol_type = other RNA; note = Description of Artificial Sequence: Synthetic oligonucleotide
catgctgttgccttaagttgg

SEQ ID NO: 26149 - RNA, 21 nt, synthetic construct
  source 1..21: mol_type = other RNA; note = Description of Artificial Sequence: Synthetic oligonucleotide
ccatgctgttgccttaagttg

SEQ ID NO: 26150 - RNA, 21 nt, synthetic construct
  source 1..21: mol_type = other RNA; note = Description of Artificial Sequence: Synthetic oligonucleotide
cccatgctgttgccttaagtt

SEQ ID NO: 26151 - RNA, 21 nt, synthetic construct
  source 1..21: mol_type = other RNA; note = Description of Artificial Sequence: Synthetic oligonucleotide
acccatgctgttgccttaagt

SEQ ID NO: 26152 - RNA, 21 nt, synthetic construct
  source 1..21: mol_type = other RNA; note = Description of Artificial Sequence: Synthetic oligonucleotide
cacccatgctgttgccttaag

SEQ ID NO: 26153 - RNA, 21 nt, synthetic construct
  source 1..21: mol_type = other RNA; note = Description of Artificial Sequence: Synthetic oligonucleotide
tcacccatgctgttgccttaa

SEQ ID NO: 26154 - RNA, 21 nt, synthetic construct
  source 1..21: mol_type = other RNA; note = Description of Artificial Sequence: Synthetic oligonucleotide
ttcacccatgctgttgcctta

SEQ ID NO: 26155 - RNA, 21 nt, synthetic construct
  source 1..21: mol_type = other RNA; note = Description of Artificial Sequence: Synthetic oligonucleotide
attcacccatgctgttgcctt

SEQ ID NO: 26156 - RNA, 21 nt, synthetic construct
  source 1..21: mol_type = other RNA; note = Description of Artificial Sequence: Synthetic oligonucleotide
tattcacccatgctgttgcct

SEQ ID NO: 26157 - RNA, 21 nt, synthetic construct
  source 1..21: mol_type = other RNA; note = Description of Artificial Sequence: Synthetic oligonucleotide
ttattcacccatgctgttgcc

SEQ ID NO: 26158 - RNA, 21 nt, synthetic construct
  source 1..21: mol_type = other RNA; note = Description of Artificial Sequence: Synthetic oligonucleotide
cttattcacccatgctgttgc

SEQ ID NO: 26159 - RNA, 21 nt, synthetic construct
  source 1..21: mol_type = other RNA; note = Description of Artificial Sequence: Synthetic oligonucleotide
ccttattcacccatgctgttg

SEQ ID NO: 26160 - RNA, 21 nt, synthetic construct
  source 1..21: mol_type = other RNA; note = Description of Artificial Sequence: Synthetic oligonucleotide
cccttattcacccatgctgtt

SEQ ID NO: 26161 - RNA, 21 nt, synthetic construct
  source 1..21: mol_type = other RNA; note = Description of Artificial Sequence: Synthetic oligonucleotide
gcccttattcacccatgctgt

SEQ ID NO: 26162 - RNA, 21 nt, synthetic construct
  source 1..21: mol_type = other RNA; note = Description of Artificial Sequence: Synthetic oligonucleotide
agcccttattcacccatgctg

SEQ ID NO: 26163 - RNA, 21 nt, synthetic construct
  source 1..21: mol_type = other RNA; note = Description of Artificial Sequence: Synthetic oligonucleotide
aagcccttattcacccatgct

SEQ ID NO: 26164 - RNA, 21 nt, synthetic construct
  source 1..21: mol_type = other RNA; note = Description of Artificial Sequence: Synthetic oligonucleotide
gaagcccttattcacccatgc

SEQ ID NO: 26165 - RNA, 21 nt, synthetic construct
  source 1..21: mol_type = other RNA; note = Description of Artificial Sequence: Synthetic oligonucleotide
ggaagcccttattcacccatg

SEQ ID NO: 26166 - RNA, 21 nt, synthetic construct
  source 1..21: mol_type = other RNA; note = Description of Artificial Sequence: Synthetic oligonucleotide
aggaagcccttattcacccat

SEQ ID NO: 26167 - RNA, 21 nt, synthetic construct
  source 1..21: mol_type = other RNA; note = Description of Artificial Sequence: Synthetic oligonucleotide
caggaagcccttattcaccca

SEQ ID NO: 26168 - RNA, 21 nt, synthetic construct
  source 1..21: mol_type = other RNA; note = Description of Artificial Sequence: Synthetic oligonucleotide
acaggaagcccttattcaccc

SEQ ID NO: 26169 - RNA, 21 nt, synthetic construct
  source 1..21: mol_type = other RNA; note = Description of Artificial Sequence: Synthetic oligonucleotide
cacaggaagcccttattcacc

SEQ ID NO: 26170 - RNA, 21 nt, synthetic construct
  source 1..21: mol_type = other RNA; note = Description of Artificial Sequence: Synthetic oligonucleotide
ccacaggaagcccttattcac

SEQ ID NO: 26171 - RNA, 21 nt, synthetic construct
  source 1..21: mol_type = other RNA; note = Description of Artificial Sequence: Synthetic oligonucleotide
tccacaggaagcccttattca

SEQ ID NO: 26172 - RNA, 21 nt, synthetic construct
  source 1..21: mol_type = other RNA; note = Description of Artificial Sequence: Synthetic oligonucleotide
gtccacaggaagcccttattc

SEQ ID NO: 26173 - RNA, 21 nt, synthetic construct
  source 1..21: mol_type = other RNA; note = Description of Artificial Sequence: Synthetic oligonucleotide
agtccacaggaagcccttatt

SEQ ID NO: 26174 - RNA, 21 nt, synthetic construct
  source 1..21: mol_type = other RNA; note = Description of Artificial Sequence: Synthetic oligonucleotide
cagtccacaggaagcccttat

SEQ ID NO: 26175 - RNA, 21 nt, synthetic construct
  source 1..21: mol_type = other RNA; note = Description of Artificial Sequence: Synthetic oligonucleotide
ccagtccacaggaagccctta

SEQ ID NO: 26176 - RNA, 21 nt, synthetic construct
  source 1..21: mol_type = other RNA; note = Description of Artificial Sequence: Synthetic oligonucleotide
gccagtccacaggaagccctt

SEQ ID NO: 26177 - RNA, 21 nt, synthetic construct
  source 1..21: mol_type = other RNA; note = Description of Artificial Sequence: Synthetic oligonucleotide
tgccagtccacaggaagccct

SEQ ID NO: 26178 - RNA, 21 nt, synthetic construct
  source 1..21: mol_type = other RNA; note = Description of Artificial Sequence: Synthetic oligonucleotide
ttgccagtccacaggaagccc

SEQ ID NO: 26179 - RNA, 21 nt, synthetic construct
  source 1..21: mol_type = other RNA; note = Description of Artificial Sequence: Synthetic oligonucleotide
attgccagtccacaggaagcc

SEQ ID NO: 26180 - RNA, 21 nt, synthetic construct
  source 1..21: mol_type = other RNA; note = Description of Artificial Sequence: Synthetic oligonucleotide
cattgccagtccacaggaagc

SEQ ID NO: 26181 - RNA, 21 nt, synthetic construct
  source 1..21: mol_type = other RNA; note = Description of Artificial Sequence: Synthetic oligonucleotide
tcattgccagtccacaggaag

SEQ ID NO: 26182 - RNA, 21 nt, synthetic construct
  source 1..21: mol_type = other RNA; note = Description of Artificial Sequence: Synthetic oligonucleotide
ctcattgccagtccacaggaa

SEQ ID NO: 26183 - RNA, 21 nt, synthetic construct
  source 1..21: mol_type = other RNA; note = Description of Artificial Sequence: Synthetic oligonucleotide
tctcattgccagtccacagga

SEQ ID NO: 26184 - RNA, 21 nt, synthetic construct
  source 1..21: mol_type = other RNA; note = Description of Artificial Sequence: Synthetic oligonucleotide
ctctcattgccagtccacagg

SEQ ID NO: 26185 - RNA, 21 nt, synthetic construct
  source 1..21: mol_type = other RNA; note = Description of Artificial Sequence: Synthetic oligonucleotide
cctctcattgccagtccacag

SEQ ID NO: 26186 - RNA, 21 nt, synthetic construct
  source 1..21: mol_type = other RNA; note = Description of Artificial Sequence: Synthetic oligonucleotide
gcctctcattgccagtccaca

SEQ ID NO: 26187 - RNA, 21 nt, synthetic construct
  source 1..21: mol_type = other RNA; note = Description of Artificial Sequence: Synthetic oligonucleotide
tgcctctcattgccagtccac

SEQ ID NO: 26188 - RNA, 21 nt, synthetic construct
  source 1..21: mol_type = other RNA; note = Description of Artificial Sequence: Synthetic oligonucleotide
ttgcctctcattgccagtcca

SEQ ID NO: 26189 - RNA, 21 nt, synthetic construct
  source 1..21: mol_type = other RNA; note = Description of Artificial Sequence: Synthetic oligonucleotide
tttgcctctcattgccagtcc

SEQ ID NO: 26190 - RNA, 21 nt, synthetic construct
  source 1..21: mol_type = other RNA; note = Description of Artificial Sequence: Synthetic oligonucleotide
ttttgcctctcattgccagtc

SEQ ID NO: 26191 - RNA, 21 nt, synthetic construct
  source 1..21: mol_type = other RNA; note = Description of Artificial Sequence: Synthetic oligonucleotide
gttttgcctctcattgccagt

SEQ ID NO: 26192 - RNA, 21 nt, synthetic construct
  source 1..21: mol_type = other RNA; note = Description of Artificial Sequence: Synthetic oligonucleotide
ggttttgcctctcattgccag

SEQ ID NO: 26193 - RNA, 21 nt, synthetic construct
  source 1..21: mol_type = other RNA; note = Description of Artificial Sequence: Synthetic oligonucleotide
aggttttgcctctcattgcca

SEQ ID NO: 26194 - RNA, 21 nt, synthetic construct
  source 1..21: mol_type = other RNA; note = Description of Artificial Sequence: Synthetic oligonucleotide
caggttttgcctctcattgcc

SEQ ID NO: 26195 - RNA, 21 nt, synthetic construct
  source 1..21: mol_type = other RNA; note = Description of Artificial Sequence: Synthetic oligonucleotide
ccaggttttgcctctcattgc

SEQ ID NO: 26196 - RNA, 21 nt, synthetic construct
  source 1..21: mol_type = other RNA; note = Description of Artificial Sequence: Synthetic oligonucleotide
accaggttttgcctctcattg

SEQ ID NO: 26197 - RNA, 21 nt, synthetic construct
  source 1..21: mol_type = other RNA; note = Description of Artificial Sequence: Synthetic oligonucleotide
caccaggttttgcctctcatt

SEQ ID NO: 26198 - RNA, 21 nt, synthetic construct
  source 1..21: mol_type = other RNA; note = Description of Artificial Sequence: Synthetic oligonucleotide
gcaccaggttttgcctctcat

SEQ ID NO: 26199 - RNA, 21 nt, synthetic construct
  source 1..21: mol_type = other RNA; note = Description of Artificial Sequence: Synthetic oligonucleotide
agcaccaggttttgcctctca

SEQ ID NO: 26200 - RNA, 21 nt, synthetic construct
  source 1..21: mol_type = other RNA; note = Description of Artificial Sequence: Synthetic oligonucleotide
aagcaccaggttttgcctctc

SEQ ID NO: 26201 - RNA, 21 nt, synthetic construct
  source 1..21: mol_type = other RNA; note = Description of Artificial Sequence: Synthetic oligonucleotide
caagcaccaggttttgcctct

SEQ ID NO: 26202 - RNA, 21 nt, synthetic construct
  source 1..21: mol_type = other RNA; note = Description of Artificial Sequence: Synthetic oligonucleotide
tcaagcaccaggttttgcctc

SEQ ID NO: 26203 - RNA, 21 nt, synthetic construct
  source 1..21: mol_type = other RNA; note = Description of Artificial Sequence: Synthetic oligonucleotide
ctcaagcaccaggttttgcct

SEQ ID NO: 26204 - RNA, 21 nt, synthetic construct
  source 1..21: mol_type = other RNA; note = Description of Artificial Sequence: Synthetic oligonucleotide
gctcaagcaccaggttttgcc

SEQ ID NO: 26205 - RNA, 21 nt, synthetic construct
  source 1..21: mol_type = other RNA; note = Description of Artificial Sequence: Synthetic oligonucleotide
tgctcaagcaccaggttttgc

SEQ ID NO: 26206 - RNA, 21 nt, synthetic construct
  source 1..21: mol_type = other RNA; note = Description of Artificial Sequence: Synthetic oligonucleotide
gtgctcaagcaccaggttttg

SEQ ID NO: 26207 - RNA, 21 nt, synthetic construct
  source 1..21: mol_type = other RNA; note = Description of Artificial Sequence: Synthetic oligonucleotide
agtgctcaagcaccaggtttt

SEQ ID NO: 26208 - RNA, 21 nt, synthetic construct
  source 1..21: mol_type = other RNA; note = Description of Artificial Sequence: Synthetic oligonucleotide
cagtgctcaagcaccaggttt

SEQ ID NO: 26209 - RNA, 21 nt, synthetic construct
  source 1..21: mol_type = other RNA; note = Description of Artificial Sequence: Synthetic oligonucleotide
ccagtgctcaagcaccaggtt

SEQ ID NO: 26210 - RNA, 21 nt, synthetic construct
  source 1..21: mol_type = other RNA; note = Description of Artificial Sequence: Synthetic oligonucleotide
gccagtgctcaagcaccaggt

SEQ ID NO: 26211 - RNA, 21 nt, synthetic construct
  source 1..21: mol_type = other RNA; note = Description of Artificial Sequence: Synthetic oligonucleotide
ggccagtgctcaagcaccagg

SEQ ID NO: 26212 - RNA, 21 nt, synthetic construct
  source 1..21: mol_type = other RNA; note = Description of Artificial Sequence: Synthetic oligonucleotide
gggccagtgctcaagcaccag

SEQ ID NO: 26213 - RNA, 21 nt, synthetic construct
  source 1..21: mol_type = other RNA; note = Description of Artificial Sequence: Synthetic oligonucleotide
ggggccagtgctcaagcacca

SEQ ID NO: 26214 - RNA, 21 nt, synthetic construct
  source 1..21: mol_type = other RNA; note = Description of Artificial Sequence: Synthetic oligonucleotide
aggggccagtgctcaagcacc

SEQ ID NO: 26215 - RNA, 21 nt, synthetic construct
  source 1..21: mol_type = other RNA; note = Description of Artificial Sequence: Synthetic oligonucleotide
taggggccagtgctcaagcac

SEQ ID NO: 26216 - RNA, 21 nt, synthetic construct
  source 1..21: mol_type = other RNA; note = Description of Artificial Sequence: Synthetic oligonucleotide
ttaggggccagtgctcaagca

SEQ ID NO: 26217 - RNA, 21 nt, synthetic construct
  source 1..21: mol_type = other RNA; note = Description of Artificial Sequence: Synthetic oligonucleotide
cttaggggccagtgctcaagc

SEQ ID NO: 26218 - RNA, 21 nt, synthetic construct
  source 1..21: mol_type = other RNA; note = Description of Artificial Sequence: Synthetic oligonucleotide
ccttaggggccagtgctcaag

SEQ ID NO: 26219 - RNA, 21 nt, synthetic construct
  source 1..21: mol_type = other RNA; note = Description of Artificial Sequence: Synthetic oligonucleotide
gccttaggggccagtgctcaa

SEQ ID NO: 26220 - RNA, 21 nt, synthetic construct
  source 1..21: mol_type = other RNA; note = Description of Artificial Sequence: Synthetic oligonucleotide
tgccttaggggccagtgctca

SEQ ID NO: 26221 - RNA, 21 nt, synthetic construct
  source 1..21: mol_type = other RNA; note = Description of Artificial Sequence: Synthetic oligonucleotide
ctgccttaggggccagtgctc

SEQ ID NO: 26222 - RNA, 21 nt, synthetic construct
  source 1..21: mol_type = other RNA; note = Description of Artificial Sequence: Synthetic oligonucleotide
cctgccttaggggccagtgct

SEQ ID NO: 26223 - RNA, 21 nt, synthetic construct
  source 1..21: mol_type = other RNA; note = Description of Artificial Sequence: Synthetic oligonucleotide
gcctgccttaggggccagtgc

SEQ ID NO: 26224 - RNA, 21 nt, synthetic construct
  source 1..21: mol_type = other RNA; note = Description of Artificial Sequence: Synthetic oligonucleotide
ggcctgccttaggggccagtg

SEQ ID NO: 26225 - RNA, 21 nt, synthetic construct
  source 1..21: mol_type = other RNA; note = Description of Artificial Sequence: Synthetic oligonucleotide
aggcctgccttaggggccagt

SEQ ID NO: 26226 - RNA, 21 nt, synthetic construct
  source 1..21: mol_type = other RNA; note = Description of Artificial Sequence: Synthetic oligonucleotide
aaggcctgccttaggggccag

SEQ ID NO: 26227 - RNA, 21 nt, synthetic construct
  source 1..21: mol_type = other RNA; note = Description of Artificial Sequence: Synthetic oligonucleotide
taaggcctgccttaggggcca

SEQ ID NO: 26228 - RNA, 21 nt, synthetic construct
  source 1..21: mol_type = other RNA; note = Description of Artificial Sequence: Synthetic oligonucleotide
gtaaggcctgccttaggggcc

SEQ ID NO: 26229 - RNA, 21 nt, synthetic construct
  source 1..21: mol_type = other RNA; note = Description of Artificial Sequence: Synthetic oligonucleotide
tgtaaggcctgccttaggggc

SEQ ID NO: 26230 - RNA, 21 nt, synthetic construct
  source 1..21: mol_type = other RNA; note = Description of Artificial Sequence: Synthetic oligonucleotide
ctgtaaggcctgccttagggg

SEQ ID NO: 26231 - RNA, 21 nt, synthetic construct
  source 1..21: mol_type = other RNA; note = Description of Artificial Sequence: Synthetic oligonucleotide
tctgtaaggcctgccttaggg

SEQ ID NO: 26232 - RNA, 21 nt, synthetic construct
  source 1..21: mol_type = other RNA; note = Description of Artificial Sequence: Synthetic oligonucleotide
atctgtaaggcctgccttagg

SEQ ID NO: 26233 - RNA, 21 nt, synthetic construct
  source 1..21: mol_type = other RNA; note = Description of Artificial Sequence: Synthetic oligonucleotide
gatctgtaaggcctgccttag

SEQ ID NO: 26234 - RNA, 21 nt, synthetic construct
  source 1..21: mol_type = other RNA; note = Description of Artificial Sequence: Synthetic oligonucleotide
agatctgtaaggcctgcctta

SEQ ID NO: 26235 - RNA, 21 nt, synthetic construct
  source 1..21: mol_type = other RNA; note = Description of Artificial Sequence: Synthetic oligonucleotide
gagatctgtaaggcctgcctt

SEQ ID NO: 26236 - RNA, 21 nt, synthetic construct
  source 1..21: mol_type = other RNA; note = Description of Artificial Sequence: Synthetic oligonucleotide
agagatctgtaaggcctgcct

SEQ ID NO: 26237 - RNA, 21 nt, synthetic construct
  source 1..21: mol_type = other RNA; note = Description of Artificial Sequence: Synthetic oligonucleotide
aagagatctgtaaggcctgcc

SEQ ID NO: 26238 - RNA, 21 nt, synthetic construct
  source 1..21: mol_type = other RNA; note = Description of Artificial Sequence: Synthetic oligonucleotide
taagagatctgtaaggcctgc

SEQ ID NO: 26239 - RNA, 21 nt, synthetic construct
  source 1..21: mol_type = other RNA; note = Description of Artificial Sequence: Synthetic oligonucleotide
gtaagagatctgtaaggcctg

SEQ ID NO: 26240 - RNA, 21 nt, synthetic construct
  source 1..21: mol_type = other RNA; note = Description of Artificial Sequence: Synthetic oligonucleotide
tgtaagagatctgtaaggcct

SEQ ID NO: 26241 - RNA, 21 nt, synthetic construct
  source 1..21: mol_type = other RNA; note = Description of Artificial Sequence: Synthetic oligonucleotide
gtgtaagagatctgtaaggcc

SEQ ID NO: 26242 - RNA, 21 nt, synthetic construct
  source 1..21: mol_type = other RNA; note = Description of Artificial Sequence: Synthetic oligonucleotide
agtgtaagagatctgtaaggc

SEQ ID NO: 26243 - RNA, 21 nt, synthetic construct
  source 1..21: mol_type = other RNA; note = Description of Artificial Sequence: Synthetic oligonucleotide
gagtgtaagagatctgtaagg

SEQ ID NO: 26244 - RNA, 21 nt, synthetic construct
  source 1..21: mol_type = other RNA; note = Description of Artificial Sequence: Synthetic oligonucleotide
cgagtgtaagagatctgtaag

SEQ ID NO: 26245 - RNA, 21 nt, synthetic construct
  source 1..21: mol_type = other RNA; note = Description of Artificial Sequence: Synthetic oligonucleotide
acgagtgtaagagatctgtaa

SEQ ID NO: 26246 - RNA, 21 nt, synthetic construct
  source 1..21: mol_type = other RNA; note = Description of Artificial Sequence: Synthetic oligonucleotide
cacgagtgtaagagatctgta

SEQ ID NO: 26247 - RNA, 21 nt, synthetic construct
  source 1..21: mol_type = other RNA; note = Description of Artificial Sequence: Synthetic oligonucleotide
ccacgagtgtaagagatctgt

SEQ ID NO: 26248 - RNA, 21 nt, synthetic construct
  source 1..21: mol_type = other RNA; note = Description of Artificial Sequence: Synthetic oligonucleotide
accacgagtgtaagagatctg

SEQ ID NO: 26249 - RNA, 21 nt, synthetic construct
  source 1..21: mol_type = other RNA; note = Description of Artificial Sequence: Synthetic oligonucleotide
caccacgagtgtaagagatct

SEQ ID NO: 26250 - RNA, 21 nt, synthetic construct
  source 1..21: mol_type = other RNA; note = Description of Artificial Sequence: Synthetic oligonucleotide
ccaccacgagtgtaagagatc

SEQ ID NO: 26251 - RNA, 21 nt, synthetic construct
  source 1..21: mol_type = other RNA; note = Description of Artificial Sequence: Synthetic oligonucleotide
cccaccacgagtgtaagagat

SEQ ID NO: 26252 - RNA, 21 nt, synthetic construct
  source 1..21: mol_type = other RNA; note = Description of Artificial Sequence: Synthetic oligonucleotide
tcccaccacgagtgtaagaga

SEQ ID NO: 26253 - RNA, 21 nt, synthetic construct
  source 1..21: mol_type = other RNA; note = Description of Artificial Sequence: Synthetic oligonucleotide
ttcccaccacgagtgtaagag

SEQ ID NO: 26254 - RNA, 21 nt, synthetic construct
  source 1..21: mol_type = other RNA; note = Description of Artificial Sequence: Synthetic oligonucleotide
cttcccaccacgagtgtaaga

SEQ ID NO: 26255 - RNA, 21 nt, synthetic construct
  source 1..21: mol_type = other RNA; note = Description of Artificial Sequence: Synthetic oligonucleotide
tcttcccaccacgagtgtaag

SEQ ID NO: 26256 - RNA, 21 nt, synthetic construct
  source 1..21: mol_type = other RNA; note = Description of Artificial Sequence: Synthetic oligonucleotide
ctcttcccaccacgagtgtaa

SEQ ID NO: 26257 - RNA, 21 nt, synthetic construct
  source 1..21: mol_type = other RNA; note = Description of Artificial Sequence: Synthetic oligonucleotide
actcttcccaccacgagtgta

SEQ ID NO: 26258 - RNA, 21 nt, synthetic construct
  source 1..21: mol_type = other RNA; note = Description of Artificial Sequence: Synthetic oligonucleotide
aactcttcccaccacgagtgt

SEQ ID NO: 26259 - RNA, 21 nt, synthetic construct
  source 1..21: mol_type = other RNA; note = Description of Artificial Sequence: Synthetic oligonucleotide
aaactcttcccaccacgagtg

SEQ ID NO: 26260 - RNA, 21 nt, synthetic construct
  source 1..21: mol_type = other RNA; note = Description of Artificial Sequence: Synthetic oligonucleotide
taaactcttcccaccacgagt

SEQ ID NO: 26261 - RNA, 21 nt, synthetic construct
  source 1..21: mol_type = other RNA; note = Description of Artificial Sequence: Synthetic oligonucleotide
ctaaactcttcccaccacgag

SEQ ID NO: 26262 - RNA, 21 nt, synthetic construct
  source 1..21: mol_type = other RNA; note = Description of Artificial Sequence: Synthetic oligonucleotide
actaaactcttcccaccacga

SEQ ID NO: 26263 - RNA, 21 nt, synthetic construct
  source 1..21: mol_type = other RNA; note = Description of Artificial Sequence: Synthetic oligonucleotide
cactaaactcttcccaccacg

SEQ ID NO: 26264 - RNA, 21 nt, synthetic construct
  source 1..21: mol_type = other RNA; note = Description of Artificial Sequence: Synthetic oligonucleotide
acactaaactcttcccaccac

SEQ ID NO: 26265 - RNA, 21 nt, synthetic construct
  source 1..21: mol_type = other RNA; note = Description of Artificial Sequence: Synthetic oligonucleotide
cacactaaactcttcccacca

SEQ ID NO: 26266 - RNA, 21 nt, synthetic construct
  source 1..21: mol_type = other RNA; note = Description of Artificial Sequence: Synthetic oligonucleotide
tcacactaaactcttcccacc

SEQ ID NO: 26267 - RNA, 21 nt, synthetic construct
  source 1..21: mol_type = other RNA; note = Description of Artificial Sequence: Synthetic oligonucleotide
ttcacactaaactcttcccac

SEQ ID NO: 26268 - RNA, 21 nt, synthetic construct
  source 1..21: mol_type = other RNA; note = Description of Artificial Sequence: Synthetic oligonucleotide
tttcacactaaactcttccca

SEQ ID NO: 26269 - RNA, 21 nt, synthetic construct
  source 1..21: mol_type = other RNA; note = Description of Artificial Sequence: Synthetic oligonucleotide
gtttcacactaaactcttccc

SEQ ID NO: 26270 - RNA, 21 nt, synthetic construct
  source 1..21: mol_type = other RNA; note = Description of Artificial Sequence: Synthetic oligonucleotide
agtttcacactaaactcttcc

SEQ ID NO: 26271 - RNA, 21 nt, synthetic construct
  source 1..21: mol_type = other RNA; note = Description of Artificial Sequence: Synthetic oligonucleotide
cagtttcacactaaactcttc

SEQ ID NO: 26272 - RNA, 21 nt, synthetic construct
  source 1..21: mol_type = other RNA; note = Description of Artificial Sequence: Synthetic oligonucleotide
ccagtttcacactaaactctt

SEQ ID NO: 26273 - RNA, 21 nt, synthetic construct
  source 1..21: mol_type = other RNA; note = Description of Artificial Sequence: Synthetic oligonucleotide
cccagtttcacactaaactct

SEQ ID NO: 26274 - RNA, 21 nt, synthetic construct
  source 1..21: mol_type = other RNA; note = Description of Artificial Sequence: Synthetic oligonucleotide
ccccagtttcacactaaactc

SEQ ID NO: 26275 - RNA, 21 nt, synthetic construct
  source 1..21: mol_type = other RNA; note = Description of Artificial Sequence: Synthetic oligonucleotide
accccagtttcacactaaact

SEQ ID NO: 26276 - RNA, 21 nt, synthetic construct
  source 1..21: mol_type = other RNA; note = Description of Artificial Sequence: Synthetic oligonucleotide
caccccagtttcacactaaac

SEQ ID NO: 26277 - RNA, 21 nt, synthetic construct
  source 1..21: mol_type = other RNA; note = Description of Artificial Sequence: Synthetic oligonucleotide
ccaccccagtttcacactaaa

SEQ ID NO: 26278 - RNA, 21 nt, synthetic construct
  source 1..21: mol_type = other RNA; note = Description of Artificial Sequence: Synthetic oligonucleotide
tccaccccagtttcacactaa

SEQ ID NO: 26279 - RNA, 21 nt, synthetic construct
  source 1..21: mol_type = other RNA; note = Description of Artificial Sequence: Synthetic oligonucleotide
ttccaccccagtttcacacta

SEQ ID NO: 26280 - RNA, 21 nt, synthetic construct
  source 1..21: mol_type = other RNA; note = Description of Artificial Sequence: Synthetic oligonucleotide
attccaccccagtttcacact

SEQ ID NO: 26281 - RNA, 21 nt, synthetic construct
  source 1..21: mol_type = other RNA; note = Description of Artificial Sequence: Synthetic oligonucleotide
aattccaccccagtttcacac

SEQ ID NO: 26282 - RNA, 21 nt, synthetic construct
  source 1..21: mol_type = other RNA; note = Description of Artificial Sequence: Synthetic oligonucleotide
caattccaccccagtttcaca

SEQ ID NO: 26283 - RNA, 21 nt, synthetic construct
  source 1..21: mol_type = other RNA; note = Description of Artificial Sequence: Synthetic oligonucleotide
ccaattccaccccagtttcac

SEQ ID NO: 26284 - RNA, 21 nt, synthetic construct
  source 1..21: mol_type = other RNA; note = Description of Artificial Sequence: Synthetic oligonucleotide
cccaattccaccccagtttca

SEQ ID NO: 26285 - RNA, 21 nt, synthetic construct
  source 1..21: mol_type = other RNA; note = Description of Artificial Sequence: Synthetic oligonucleotide
acccaattccaccccagtttc

SEQ ID NO: 26286 - RNA, 21 nt, synthetic construct
  source 1..21: mol_type = other RNA; note = Description of Artificial Sequence: Synthetic oligonucleotide
cacccaattccaccccagttt

SEQ ID NO: 26287 - RNA, 21 nt, synthetic construct
  source 1..21: mol_type = other RNA; note = Description of Artificial Sequence: Synthetic oligonucleotide
acacccaattccaccccagtt

SEQ ID NO: 26288 - RNA, 21 nt, synthetic construct
  source 1..21: mol_type = other RNA; note = Description of Artificial Sequence: Synthetic oligonucleotide
gacacccaattccaccccagt

SEQ ID NO: 26289 - RNA, 21 nt, synthetic construct
  source 1..21: mol_type = other RNA; note = Description of Artificial Sequence: Synthetic oligonucleotide
ggacacccaattccaccccag

SEQ ID NO: 26290 - RNA, 21 nt, synthetic construct
  source 1..21: mol_type = other RNA; note = Description of Artificial Sequence: Synthetic oligonucleotide
tggacacccaattccacccca

SEQ ID NO: 26291 - RNA, 21 nt, synthetic construct
  source 1..21: mol_type = other RNA; note = Description of Artificial Sequence: Synthetic oligonucleotide
gtggacacccaattccacccc

SEQ ID NO: 26292 - RNA, 21 nt, synthetic construct
  source 1..21: mol_type = other RNA; note = Description of Artificial Sequence: Synthetic oligonucleotide
cgtggacacccaattccaccc

SEQ ID NO: 26293 - RNA, 21 nt, synthetic construct
  source 1..21: mol_type = other RNA; note = Description of Artificial Sequence: Synthetic oligonucleotide
acgtggacacccaattccacc

SEQ ID NO: 26294 - RNA, 21 nt, synthetic construct
  source 1..21: mol_type = other RNA; note = Description of Artificial Sequence: Synthetic oligonucleotide
tacgtggacacccaattccac

SEQ ID NO: 26295 - RNA, 21 nt, synthetic construct
  source 1..21: mol_type = other RNA; note = Description of Artificial Sequence: Synthetic oligonucleotide
atacgtggacacccaattcca

SEQ ID NO: 26296 - RNA, 21 nt, synthetic construct
  source 1..21: mol_type = other RNA; note = Description of Artificial Sequence: Synthetic oligonucleotide
catacgtggacacccaattcc

SEQ ID NO: 26297 - RNA, 21 nt, synthetic construct
  source 1..21: mol_type = other RNA; note = Description of Artificial Sequence: Synthetic oligonucleotide
acatacgtggacacccaattc

SEQ ID NO: 26298 - RNA, 21 nt, synthetic construct
  source 1..21: mol_type = other RNA; note = Description of Artificial Sequence: Synthetic oligonucleotide
aacatacgtggacacccaatt

SEQ ID NO: 26299 - RNA, 21 nt, synthetic construct
  source 1..21: mol_type = other RNA; note = Description of Artificial Sequence: Synthetic oligonucleotide
gaacatacgtggacacccaat

SEQ ID NO: 26300 - RNA, 21 nt, synthetic construct
  source 1..21: mol_type = other RNA; note = Description of Artificial Sequence: Synthetic oligonucleotide
ggaacatacgtggacacccaa

SEQ ID NO: 26301 - RNA, 21 nt, synthetic construct
  source 1..21: mol_type = other RNA; note = Description of Artificial Sequence: Synthetic oligonucleotide
gggaacatacgtggacaccca

SEQ ID NO: 26302 - RNA, 21 nt, synthetic construct
  source 1..21: mol_type = other RNA; note = Description of Artificial Sequence: Synthetic oligonucleotide
agggaacatacgtggacaccc

SEQ ID NO: 26303 - RNA, 21 nt, synthetic construct
  source 1..21: mol_type = other RNA; note = Description of Artificial Sequence: Synthetic oligonucleotide
aagggaacatacgtggacacc

SEQ ID NO: 26304 - RNA, 21 nt, synthetic construct
  source 1..21: mol_type = other RNA; note = Description of Artificial Sequence: Synthetic oligonucleotide
aaagggaacatacgtggacac

SEQ ID NO: 26305 - RNA, 21 nt, synthetic construct
  source 1..21: mol_type = other RNA; note = Description of Artificial Sequence: Synthetic oligonucleotide
aaaagggaacatacgtggaca

SEQ ID NO: 26306 - RNA, 21 nt, synthetic construct
  source 1..21: mol_type = other RNA; note = Description of Artificial Sequence: Synthetic oligonucleotide
caaaagggaacatacgtggac

SEQ ID NO: 26307 - RNA, 21 nt, synthetic construct
  source 1..21: mol_type = other RNA; note = Description of Artificial Sequence: Synthetic oligonucleotide
gcaaaagggaacatacgtgga

SEQ ID NO: 26308 - RNA, 21 nt, synthetic construct
  source 1..21: mol_type = other RNA; note = Description of Artificial Sequence: Synthetic oligonucleotide
ggcaaaagggaacatacgtgg

SEQ ID NO: 26309 - RNA, 21 nt, synthetic construct
  source 1..21: mol_type = other RNA; note = Description of Artificial Sequence: Synthetic oligonucleotide
aggcaaaagggaacatacgtg

SEQ ID NO: 26310 - RNA, 21 nt, synthetic construct
  source 1..21: mol_type = other RNA; note = Description of Artificial Sequence: Synthetic oligonucleotide
aaggcaaaagggaacatacgt

SEQ ID NO: 26311 - RNA, 21 nt, synthetic construct
  source 1..21: mol_type = other RNA; note = Description of Artificial Sequence: Synthetic oligonucleotide
taaggcaaaagggaacatacg

SEQ ID NO: 26312 - RNA, 21 nt, synthetic construct
  source 1..21: mol_type = other RNA; note = Description of Artificial Sequence: Synthetic oligonucleotide
gtaaggcaaaagggaacatac

SEQ ID NO: 26313 - RNA, 21 nt, synthetic construct
  source 1..21: mol_type = other RNA; note = Description of Artificial Sequence: Synthetic oligonucleotide
agtaaggcaaaagggaacata

SEQ ID NO: 26314 - RNA, 21 nt, synthetic construct
  source 1..21: mol_type = other RNA; note = Description of Artificial Sequence: Synthetic oligonucleotide
tagtaaggcaaaagggaacat

SEQ ID NO: 26315 - RNA, 21 nt, synthetic construct
  source 1..21: mol_type = other RNA; note = Description of Artificial Sequence: Synthetic oligonucleotide
atagtaaggcaaaagggaaca

SEQ ID NO: 26316 - RNA, 21 nt, synthetic construct
  source 1..21: mol_type = other RNA; note = Description of Artificial Sequence: Synthetic oligonucleotide
tatagtaaggcaaaagggaac

SEQ ID NO: 26317 - RNA, 21 nt, synthetic construct
  source 1..21: mol_type = other RNA; note = Description of Artificial Sequence: Synthetic oligonucleotide
atatagtaaggcaaaagggaa

SEQ ID NO: 26318 - RNA, 21 nt, synthetic construct
  source 1..21: mol_type = other RNA; note = Description of Artificial Sequence: Synthetic oligonucleotide
catatagtaaggcaaaaggga

SEQ ID NO: 26319 - RNA, 21 nt, synthetic construct
  source 1..21: mol_type = other RNA; note = Description of Artificial Sequence: Synthetic oligonucleotide
acatatagtaaggcaaaaggg

SEQ ID NO: 26320 - RNA, 21 nt, synthetic construct
  source 1..21: mol_type = other RNA; note = Description of Artificial Sequence: Synthetic oligonucleotide
aacatatagtaaggcaaaagg

SEQ ID NO: 26321 - RNA, 21 nt, synthetic construct
  source 1..21: mol_type = other RNA; note = Description of Artificial Sequence: Synthetic oligonucleotide
gaacatatagtaaggcaaaag

SEQ ID NO: 26322 - RNA, 21 nt, synthetic construct
  source 1..21: mol_type = other RNA; note = Description of Artificial Sequence: Synthetic oligonucleotide
agaacatatagtaaggcaaaa

SEQ ID NO: 26323 - RNA, 21 nt, synthetic construct
  source 1..21: mol_type = other RNA; note = Description of Artificial Sequence: Synthetic oligonucleotide
cagaacatatagtaaggcaaa

SEQ ID NO: 26324 - RNA, 21 nt, synthetic construct
  source 1..21: mol_type = other RNA; note = Description of Artificial Sequence: Synthetic oligonucleotide
acagaacatatagtaaggcaa

SEQ ID NO: 26325 - RNA, 21 nt, synthetic construct
  source 1..21: mol_type = other RNA; note = Description of Artificial Sequence: Synthetic oligonucleotide
gacagaacatatagtaaggca

SEQ ID NO: 26326 - RNA, 21 nt, synthetic construct
  source 1..21: mol_type = other RNA; note = Description of Artificial Sequence: Synthetic oligonucleotide
tgacagaacatatagtaaggc

SEQ ID NO: 26327 - RNA, 21 nt, synthetic construct
  source 1..21: mol_type = other RNA; note = Description of Artificial Sequence: Synthetic oligonucleotide
ctgacagaacatatagtaagg

SEQ ID NO: 26328 - RNA, 21 nt, synthetic construct
  source 1..21: mol_type = other RNA; note = Description of Artificial Sequence: Synthetic oligonucleotide
actgacagaacatatagtaag

SEQ ID NO: 26329 - RNA, 21 nt, synthetic construct
  source 1..21: mol_type = other RNA; note = Description of Artificial Sequence: Synthetic oligonucleotide
aactgacagaacatatagtaa

SEQ ID NO: 26330 - RNA, 21 nt, synthetic construct
  source 1..21: mol_type = other RNA; note = Description of Artificial Sequence: Synthetic oligonucleotide
aaactgacagaacatatagta

SEQ ID NO: 26331 - RNA, 21 nt, synthetic construct
  source 1..21: mol_type = other RNA; note = Description of Artificial Sequence: Synthetic oligonucleotide
gaaactgacagaacatatagt

SEQ ID NO: 26332 - RNA, 21 nt, synthetic construct
  source 1..21: mol_type = other RNA; note = Description of Artificial Sequence: Synthetic oligonucleotide
agaaactgacagaacatatag

SEQ ID NO: 26333 - RNA, 21 nt, synthetic construct
  source 1..21: mol_type = other RNA; note = Description of Artificial Sequence: Synthetic oligonucleotide
aagaaactgacagaacatata

SEQ ID NO: 26334 - RNA, 21 nt, synthetic construct
  source 1..21: mol_type = other RNA; note = Description of Artificial Sequence: Synthetic oligonucleotide
aaagaaactgacagaacatat

SEQ ID NO: 26335 - RNA, 21 nt, synthetic construct
  source 1..21: mol_type = other RNA; note = Description of Artificial Sequence: Synthetic oligonucleotide
gaaagaaactgacagaacata

SEQ ID NO: 26336 - RNA, 21 nt, synthetic construct
  source 1..21: mol_type = other RNA; note = Description of Artificial Sequence: Synthetic oligonucleotide
tgaaagaaactgacagaacat

SEQ ID NO: 26337 - RNA, 21 nt, synthetic construct
  source 1..21: mol_type = other RNA; note = Description of Artificial Sequence: Synthetic oligonucleotide
ctgaaagaaactgacagaaca

SEQ ID NO: 26338 - RNA, 21 nt, synthetic construct
  source 1..21: mol_type = other RNA; note = Description of Artificial Sequence: Synthetic oligonucleotide
cctgaaagaaactgacagaac

SEQ ID NO: 26339 - RNA, 21 nt, synthetic construct
  source 1..21: mol_type = other RNA; note = Description of Artificial Sequence: Synthetic oligonucleotide
tcctgaaagaaactgacagaa

SEQ ID NO: 26340 - RNA, 21 nt, synthetic construct
  source 1..21: mol_type = other RNA; note = Description of Artificial Sequence: Synthetic oligonucleotide
ttcctgaaagaaactgacaga

SEQ ID NO: 26341 - RNA, 21 nt, synthetic construct
  source 1..21: mol_type = other RNA; note = Description of Artificial Sequence: Synthetic oligonucleotide
tttcctgaaagaaactgacag

SEQ ID NO: 26342 - RNA, 21 nt, synthetic construct
  source 1..21: mol_type = other RNA; note = Description of Artificial Sequence: Synthetic oligonucleotide
ttttcctgaaagaaactgaca

SEQ ID NO: 26343 - RNA, 21 nt, synthetic construct
  source 1..21: mol_type = other RNA; note = Description of Artificial Sequence: Synthetic oligonucleotide
attttcctgaaagaaactgac

SEQ ID NO: 26344 - RNA, 21 nt, synthetic construct
  source 1..21: mol_type = other RNA; note = Description of Artificial Sequence: Synthetic oligonucleotide
gattttcctgaaagaaactga

SEQ ID NO: 26345 - RNA, 21 nt, synthetic construct
  source 1..21: mol_type = other RNA; note = Description of Artificial Sequence: Synthetic oligonucleotide
agattttcctgaaagaaactg

SEQ ID NO: 26346 - RNA, 21 nt, synthetic construct
  source 1..21: mol_type = other RNA; note = Description of Artificial Sequence: Synthetic oligonucleotide
aagattttcctgaaagaaact

SEQ ID NO: 26347 - RNA, 21 nt, synthetic construct
  source 1..21: mol_type = other RNA; note = Description of Artificial Sequence: Synthetic oligonucleotide
gaagattttcctgaaagaaac

SEQ ID NO: 26348 - RNA, 21 nt, synthetic construct
  source 1..21: mol_type = other RNA; note = Description of Artificial Sequence: Synthetic oligonucleotide
tgaagattttcctgaaagaaa

SEQ ID NO: 26349 - RNA, 21 nt, synthetic construct
  source 1..21: mol_type = other RNA; note = Description of Artificial Sequence: Synthetic oligonucleotide
atgaagattttcctgaaagaa

SEQ ID NO: 26350 - RNA, 21 nt, synthetic construct
  source 1..21: mol_type = other RNA; note = Description of Artificial Sequence: Synthetic oligonucleotide
gatgaagattttcctgaaaga

SEQ ID NO: 26351 - RNA, 21 nt, synthetic construct
  source 1..21: mol_type = other RNA; note = Description of Artificial Sequence: Synthetic oligonucleotide
agatgaagattttcctgaaag

SEQ ID NO: 26352 - RNA, 21 nt, synthetic construct
  source 1..21: mol_type = other RNA; note = Description of Artificial Sequence: Synthetic oligonucleotide
aagatgaagattttcctgaaa

SEQ ID NO: 26353 - RNA, 21 nt, synthetic construct
  source 1..21: mol_type = other RNA; note = Description of Artificial Sequence: Synthetic oligonucleotide
taagatgaagattttcctgaa

SEQ ID NO: 26354 - RNA, 21 nt, synthetic construct
  source 1..21: mol_type = other RNA; note = Description of Artificial Sequence: Synthetic oligonucleotide
gtaagatgaagattttcctga

SEQ ID NO: 26355 - RNA, 21 nt, synthetic construct
  source 1..21: mol_type = other RNA; note = Description of Artificial Sequence: Synthetic oligonucleotide
tgtaagatgaagattttcctg

SEQ ID NO: 26356 - RNA, 21 nt, synthetic construct
  source 1..21: mol_type = other RNA; note = Description of Artificial Sequence: Synthetic oligonucleotide
ttgtaagatgaagattttcct

SEQ ID NO: 26357 - RNA, 21 nt, synthetic construct
  source 1..21: mol_type = other RNA; note = Description of Artificial Sequence: Synthetic oligonucleotide
gttgtaagatgaagattttcc

SEQ ID NO: 26358 - RNA, 21 nt, synthetic construct
  source 1..21: mol_type = other RNA; note = Description of Artificial Sequence: Synthetic oligonucleotide
agttgtaagatgaagattttc

SEQ ID NO: 26359 - RNA, 21 nt, synthetic construct
  source 1..21: mol_type = other RNA; note = Description of Artificial Sequence: Synthetic oligonucleotide
aagttgtaagatgaagatttt

SEQ ID NO: 26360 - RNA, 21 nt, synthetic construct
  source 1..21: mol_type = other RNA; note = Description of Artificial Sequence: Synthetic oligonucleotide
caagttgtaagatgaagattt

SEQ ID NO: 26361 - RNA, 21 nt, synthetic construct
  source 1..21: mol_type = other RNA; note = Description of Artificial Sequence: Synthetic oligonucleotide
acaagttgtaagatgaagatt

SEQ ID NO: 26362 - RNA, 21 nt, synthetic construct
  source 1..21: mol_type = other RNA; note = Description of Artificial Sequence: Synthetic oligonucleotide
tacaagttgtaagatgaagat

SEQ ID NO: 26363 - RNA, 21 nt, synthetic construct
  source 1..21: mol_type = other RNA; note = Description of Artificial Sequence: Synthetic oligonucleotide
ctacaagttgtaagatgaaga

SEQ ID NO: 26364 - RNA, 21 nt, synthetic construct
  source 1..21: mol_type = other RNA; note = Description of Artificial Sequence: Synthetic oligonucleotide
cctacaagttgtaagatgaag

SEQ ID NO: 26365 - RNA, 21 nt, synthetic construct
  source 1..21: mol_type = other RNA; note = Description of Artificial Sequence: Synthetic oligonucleotide
ccctacaagttgtaagatgaa

SEQ ID NO: 26366 - RNA, 21 nt, synthetic construct
  source 1..21: mol_type = other RNA; note = Description of Artificial Sequence: Synthetic oligonucleotide
gccctacaagttgtaagatga

SEQ ID NO: 26367 - RNA, 21 nt, synthetic construct
  source 1..21: mol_type = other RNA; note = Description of Artificial Sequence: Synthetic oligonucleotide
agccctacaagttgtaagatg

SEQ ID NO: 26368 - RNA, 21 nt, synthetic construct
  source 1..21: mol_type = other RNA; note = Description of Artificial Sequence: Synthetic oligonucleotide
cagccctacaagttgtaagat

SEQ ID NO: 26369 - RNA, 21 nt, synthetic construct
  source 1..21: mol_type = other RNA; note = Description of Artificial Sequence: Synthetic oligonucleotide
ccagccctacaagttgtaaga

SEQ ID NO: 26370 - RNA, 21 nt, synthetic construct
  source 1..21: mol_type = other RNA; note = Description of Artificial Sequence: Synthetic oligonucleotide
accagccctacaagttgtaag

SEQ ID NO: 26371 - RNA, 21 nt, synthetic construct
  source 1..21: mol_type = other RNA; note = Description of Artificial Sequence: Synthetic oligonucleotide
caccagccctacaagttgtaa

SEQ ID NO: 26372 - RNA, 21 nt, synthetic construct
  source 1..21: mol_type = other RNA; note = Description of Artificial Sequence: Synthetic oligonucleotide
acaccagccctacaagttgta

SEQ ID NO: 26373 - RNA, 21 nt, synthetic construct
  source 1..21: mol_type = other RNA; note = Description of Artificial Sequence: Synthetic oligonucleotide
aacaccagccctacaagttgt

SEQ ID NO: 26374 - RNA, 21 nt, synthetic construct
  source 1..21: mol_type = other RNA; note = Description of Artificial Sequence: Synthetic oligonucleotide
taacaccagccctacaagttg

SEQ ID NO: 26375 - RNA, 21 nt, synthetic construct
  source 1..21: mol_type = other RNA; note = Description of Artificial Sequence: Synthetic oligonucleotide
ttaacaccagccctacaagtt

SEQ ID NO: 26376 - RNA, 21 nt, synthetic construct
  source 1..21: mol_type = other RNA; note = Description of Artificial Sequence: Synthetic oligonucleotide
gttaacaccagccctacaagt

SEQ ID NO: 26377 - RNA, 21 nt, synthetic construct
  source 1..21: mol_type = other RNA; note = Description of Artificial Sequence: Synthetic oligonucleotide
agttaacaccagccctacaag

SEQ ID NO: 26378 - RNA, 21 nt, synthetic construct
  source 1..21: mol_type = other RNA; note = Description of Artificial Sequence: Synthetic oligonucleotide
aagttaacaccagccctacaa

SEQ ID NO: 26379 - RNA, 21 nt, synthetic construct
  source 1..21: mol_type = other RNA; note = Description of Artificial Sequence: Synthetic oligonucleotide
taagttaacaccagccctaca

SEQ ID NO: 26380 - RNA, 21 nt, synthetic construct
  source 1..21: mol_type = other RNA; note = Description of Artificial Sequence: Synthetic oligonucleotide
gtaagttaacaccagccctac

SEQ ID NO: 26381 - RNA, 21 nt, synthetic construct
  source 1..21: mol_type = other RNA; note = Description of Artificial Sequence: Synthetic oligonucleotide
cgtaagttaacaccagcccta

SEQ ID NO: 26382 - RNA, 21 nt, synthetic construct
  source 1..21: mol_type = other RNA; note = Description of Artificial Sequence: Synthetic oligonucleotide
tcgtaagttaacaccagccct

SEQ ID NO: 26383 - RNA, 21 nt, synthetic construct
  source 1..21: mol_type = other RNA; note = Description of Artificial Sequence: Synthetic oligonucleotide
gtcgtaagttaacaccagccc

SEQ ID NO: 26384 - RNA, 21 nt, synthetic construct
  source 1..21: mol_type = other RNA; note = Description of Artificial Sequence: Synthetic oligonucleotide
agtcgtaagttaacaccagcc

SEQ ID NO: 26385 - RNA, 21 nt, synthetic construct
  source 1..21: mol_type = other RNA; note = Description of Artificial Sequence: Synthetic oligonucleotide
aagtcgtaagttaacaccagc

SEQ ID NO: 26386 - RNA, 21 nt, synthetic construct
  source 1..21: mol_type = other RNA; note = Description of Artificial Sequence: Synthetic oligonucleotide
gaagtcgtaagttaacaccag

SEQ ID NO: 26387 - RNA, 21 nt, synthetic construct
  source 1..21: mol_type = other RNA; note = Description of Artificial Sequence: Synthetic oligonucleotide
tgaagtcgtaagttaacacca

SEQ ID NO: 26388 - RNA, 21 nt, synthetic construct
  source 1..21: mol_type = other RNA; note = Description of Artificial Sequence: Synthetic oligonucleotide
gtgaagtcgtaagttaacacc

SEQ ID NO: 26389 - RNA, 21 nt, synthetic construct
  source 1..21: mol_type = other RNA; note = Description of Artificial Sequence: Synthetic oligonucleotide
agtgaagtcgtaagttaacac

SEQ ID NO: 26390 - RNA, 21 nt, synthetic construct
  source 1..21: mol_type = other RNA; note = Description of Artificial Sequence: Synthetic oligonucleotide
tagtgaagtcgtaagttaaca

SEQ ID NO: 26391 - RNA, 21 nt, synthetic construct
  source 1..21: mol_type = other RNA; note = Description of Artificial Sequence: Synthetic oligonucleotide
ttagtgaagtcgtaagttaac

SEQ ID NO: 26392 - RNA, 21 nt, synthetic construct
  source 1..21: mol_type = other RNA; note = Description of Artificial Sequence: Synthetic oligonucleotide
gttagtgaagtcgtaagttaa

SEQ ID NO: 26393 - RNA, 21 nt, synthetic construct
  source 1..21: mol_type = other RNA; note = Description of Artificial Sequence: Synthetic oligonucleotide
agttagtgaagtcgtaagtta

SEQ ID NO: 26394 - RNA, 21 nt, synthetic construct
  source 1..21: mol_type = other RNA; note = Description of Artificial Sequence: Synthetic oligonucleotide
cagttagtgaagtcgtaagtt

SEQ ID NO: 26395 - RNA, 21 nt, synthetic construct
  source 1..21: mol_type = other RNA; note = Description of Artificial Sequence: Synthetic oligonucleotide
acagttagtgaagtcgtaagt

SEQ ID NO: 26396 - RNA, 21 nt, synthetic construct
  source 1..21: mol_type = other RNA; note = Description of Artificial Sequence: Synthetic oligonucleotide
cacagttagtgaagtcgtaag

SEQ ID NO: 26397 - RNA, 21 nt, synthetic construct
  source 1..21: mol_type = other RNA; note = Description of Artificial Sequence: Synthetic oligonucleotide
tcacagttagtgaagtcgtaa

SEQ ID NO: 26398 - RNA, 21 nt, synthetic construct
  source 1..21: mol_type = other RNA; note = Description of Artificial Sequence: Synthetic oligonucleotide
gtcacagttagtgaagtcgta

SEQ ID NO: 26399 - RNA, 21 nt, synthetic construct
  source 1..21: mol_type = other RNA; note = Description of Artificial Sequence: Synthetic oligonucleotide
agtcacagttagtgaagtcgt

SEQ ID NO: 26400 - RNA, 21 nt, synthetic construct
  source 1..21: mol_type = other RNA; note = Description of Artificial Sequence: Synthetic oligonucleotide
aagtcacagttagtgaagtcg

SEQ ID NO: 26401 - RNA, 21 nt, synthetic construct
  source 1..21: mol_type = other RNA; note = Description of Artificial Sequence: Synthetic oligonucleotide
aaagtcacagttagtgaagtc

SEQ ID NO: 26402 - RNA, 21 nt, synthetic construct
  source 1..21: mol_type = other RNA; note = Description of Artificial Sequence: Synthetic oligonucleotide
caaagtcacagttagtgaagt

SEQ ID NO: 26403 - RNA, 21 nt, synthetic construct
  source 1..21: mol_type = other RNA; note = Description of Artificial Sequence: Synthetic oligonucleotide
tcaaagtcacagttagtgaag

SEQ ID NO: 26404 - RNA, 21 nt, synthetic construct
  source 1..21: mol_type = other RNA; note = Description of Artificial Sequence: Synthetic oligonucleotide
ctcaaagtcacagttagtgaa

SEQ ID NO: 26405 - RNA, 21 nt, synthetic construct
  source 1..21: mol_type = other RNA; note = Description of Artificial Sequence: Synthetic oligonucleotide
tctcaaagtcacagttagtga

SEQ ID NO: 26406 - RNA, 21 nt, synthetic construct
  source 1..21: mol_type = other RNA; note = Description of Artificial Sequence: Synthetic oligonucleotide
ttctcaaagtcacagttagtg

SEQ ID NO: 26407 - RNA, 21 nt, synthetic construct
  source 1..21: mol_type = other RNA; note = Description of Artificial Sequence: Synthetic oligonucleotide
cttctcaaagtcacagttagt

SEQ ID NO: 26408 - RNA, 21 nt, synthetic construct
  source 1..21: mol_type = other RNA; note = Description of Artificial Sequence: Synthetic oligonucleotide
tcttctcaaagtcacagttag

SEQ ID NO: 26409 - RNA, 21 nt, synthetic construct
  source 1..21: mol_type = other RNA; note = Description of Artificial Sequence: Synthetic oligonucleotide
atcttctcaaagtcacagtta

SEQ ID NO: 26410 - RNA, 21 nt, synthetic construct
  source 1..21: mol_type = other RNA; note = Description of Artificial Sequence: Synthetic oligonucleotide
aatcttctcaaagtcacagtt

SEQ ID NO: 26411 - RNA, 21 nt, synthetic construct
  source 1..21: mol_type = other RNA; note = Description of Artificial Sequence: Synthetic oligonucleotide
taatcttctcaaagtcacagt

SEQ ID NO: 26412 - RNA, 21 nt, synthetic construct
  source 1..21: mol_type = other RNA; note = Description of Artificial Sequence: Synthetic oligonucleotide
ttaatcttctcaaagtcacag

SEQ ID NO: 26413 - RNA, 21 nt, synthetic construct
  source 1..21: mol_type = other RNA; note = Description of Artificial Sequence: Synthetic oligonucleotide
tttaatcttctcaaagtcaca

SEQ ID NO: 26414 - RNA, 21 nt, synthetic construct
  source 1..21: mol_type = other RNA; note = Description of Artificial Sequence: Synthetic oligonucleotide
ctttaatcttctcaaagtcac

SEQ ID NO: 26415 - RNA, 21 nt, synthetic construct
  source 1..21: mol_type = other RNA; note = Description of Artificial Sequence: Synthetic oligonucleotide
gctttaatcttctcaaagtca

SEQ ID NO: 26416 - RNA, 21 nt, synthetic construct
  source 1..21: mol_type = other RNA; note = Description of Artificial Sequence: Synthetic oligonucleotide
tgctttaatcttctcaaagtc

SEQ ID NO: 26417 - RNA, 21 nt, synthetic construct
  source 1..21: mol_type = other RNA; note = Description of Artificial Sequence: Synthetic oligonucleotide
ctgctttaatcttctcaaagt

SEQ ID NO: 26418 - RNA, 21 nt, synthetic construct
  source 1..21: mol_type = other RNA; note = Description of Artificial Sequence: Synthetic oligonucleotide
gctgctttaatcttctcaaag

SEQ ID NO: 26419 - RNA, 21 nt, synthetic construct
  source 1..21: mol_type = other RNA; note = Description of Artificial Sequence: Synthetic oligonucleotide
ggctgctttaatcttctcaaa

SEQ ID NO: 26420 - RNA, 21 nt, synthetic construct
  source 1..21: mol_type = other RNA; note = Description of Artificial Sequence: Synthetic oligonucleotide
aggctgctttaatcttctcaa

SEQ ID NO: 26421 - RNA, 21 nt, synthetic construct
  source 1..21: mol_type = other RNA; note = Description of Artificial Sequence: Synthetic oligonucleotide
taggctgctttaatcttctca

SEQ ID NO: 26422 - RNA, 21 nt, synthetic construct
  source 1..21: mol_type = other RNA; note = Description of Artificial Sequence: Synthetic oligonucleotide
ataggctgctttaatcttctc

SEQ ID NO: 26423 - RNA, 21 nt, synthetic construct
  source 1..21: mol_type = other RNA; note = Description of Artificial Sequence: Synthetic oligonucleotide
gataggctgctttaatcttct

SEQ ID NO: 26424 - RNA, 21 nt, synthetic construct
  source 1..21: mol_type = other RNA; note = Description of Artificial Sequence: Synthetic oligonucleotide
agataggctgctttaatcttc

SEQ ID NO: 26425 - RNA, 21 nt, synthetic construct
  source 1..21: mol_type = other RNA; note = Description of Artificial Sequence: Synthetic oligonucleotide
gagataggctgctttaatctt

SEQ ID NO: 26426 - RNA, 21 nt, synthetic construct
  source 1..21: mol_type = other RNA; note = Description of Artificial Sequence: Synthetic oligonucleotide
tgagataggctgctttaatct

SEQ ID NO: 26427 - RNA, 21 nt, synthetic construct
  source 1..21: mol_type = other RNA; note = Description of Artificial Sequence: Synthetic oligonucleotide
ctgagataggctgctttaatc

SEQ ID NO: 26428 - RNA, 21 nt, synthetic construct
  source 1..21: mol_type = other RNA; note = Description of Artificial Sequence: Synthetic oligonucleotide
actgagataggctgctttaat

SEQ ID NO: 26429 - RNA, 21 nt, synthetic construct
  source 1..21: mol_type = other RNA; note = Description of Artificial Sequence: Synthetic oligonucleotide
tactgagataggctgctttaa

SEQ ID NO: 26430 - RNA, 21 nt, synthetic construct
  source 1..21: mol_type = other RNA; note = Description of Artificial Sequence: Synthetic oligonucleotide
gtactgagataggctgcttta

SEQ ID NO: 26431 - RNA, 21 nt, synthetic construct
  source 1..21: mol_type = other RNA; note = Description of Artificial Sequence: Synthetic oligonucleotide
agtactgagataggctgcttt

SEQ ID NO: 26432 - RNA, 21 nt, synthetic construct
  source 1..21: mol_type = other RNA; note = Description of Artificial Sequence: Synthetic oligonucleotide
tagtactgagataggctgctt

SEQ ID NO: 26433 - RNA, 21 nt, synthetic construct
  source 1..21: mol_type = other RNA; note = Description of Artificial Sequence: Synthetic oligonucleotide
atagtactgagataggctgct

SEQ ID NO: 26434 - RNA, 21 nt, synthetic construct
  source 1..21: mol_type = other RNA; note = Description of Artificial Sequence: Synthetic oligonucleotide
aatagtactgagataggctgc

SEQ ID NO: 26435 - RNA, 21 nt, synthetic construct
  source 1..21: mol_type = other RNA; note = Description of Artificial Sequence: Synthetic oligonucleotide
aaatagtactgagataggctg

SEQ ID NO: 26436 - RNA, 21 nt, synthetic construct
  source 1..21: mol_type = other RNA; note = Description of Artificial Sequence: Synthetic oligonucleotide
gaaatagtactgagataggct

SEQ ID NO: 26437 - RNA, 21 nt, synthetic construct
  source 1..21: mol_type = other RNA; note = Description of Artificial Sequence: Synthetic oligonucleotide
agaaatagtactgagataggc

SEQ ID NO: 26438 - RNA, 21 nt, synthetic construct
  source 1..21: mol_type = other RNA; note = Description of Artificial Sequence: Synthetic oligonucleotide
tagaaatagtactgagatagg

SEQ ID NO: 26439 - RNA, 21 nt, synthetic construct
  source 1..21: mol_type = other RNA; note = Description of Artificial Sequence: Synthetic oligonucleotide
ttagaaatagtactgagatag

SEQ ID NO: 26440 - RNA, 21 nt, synthetic construct
  source 1..21: mol_type = other RNA; note = Description of Artificial Sequence: Synthetic oligonucleotide
tttagaaatagtactgagata

SEQ ID NO: 26441 - RNA, 21 nt, synthetic construct
  source 1..21: mol_type = other RNA; note = Description of Artificial Sequence: Synthetic oligonucleotide
ctttagaaatagtactgagat

SEQ ID NO: 26442 - RNA, 21 nt, synthetic construct
  source 1..21: mol_type = other RNA; note = Description of Artificial Sequence: Synthetic oligonucleotide
tctttagaaatagtactgaga

SEQ ID NO: 26443 - RNA, 21 nt, synthetic construct
  source 1..21: mol_type = other RNA; note = Description of Artificial Sequence: Synthetic oligonucleotide
gtctttagaaatagtactgag

SEQ ID NO: 26444 - RNA, 21 nt, synthetic construct
  source 1..21: mol_type = other RNA; note = Description of Artificial Sequence: Synthetic oligonucleotide
ggtctttagaaatagtactga

SEQ ID NO: 26445 - RNA, 21 nt, synthetic construct
  source 1..21: mol_type = other RNA; note = Description of Artificial Sequence: Synthetic oligonucleotide
aggtctttagaaatagtactg

SEQ ID NO: 26446 - RNA, 21 nt, synthetic construct
  source 1..21: mol_type = other RNA; note = Description of Artificial Sequence: Synthetic oligonucleotide
caggtctttagaaatagtact

SEQ ID NO: 26447 - RNA, 21 nt, synthetic construct
  source 1..21: mol_type = other RNA; note = Description of Artificial Sequence: Synthetic oligonucleotide
tcaggtctttagaaatagtac

SEQ ID NO: 26448 - RNA, 21 nt, synthetic construct
  source 1..21: mol_type = other RNA; note = Description of Artificial Sequence: Synthetic oligonucleotide
atcaggtctttagaaatagta

SEQ ID NO: 26449 - RNA, 21 nt, synthetic construct
  source 1..21: mol_type = other RNA; note = Description of Artificial Sequence: Synthetic oligonucleotide
aatcaggtctttagaaatagt

SEQ ID NO: 26450 - RNA, 21 nt, synthetic construct
  source 1..21: mol_type = other RNA; note = Description of Artificial Sequence: Synthetic oligonucleotide
taatcaggtctttagaaatag

SEQ ID NO: 26451 - RNA, 21 nt, synthetic construct
  source 1..21: mol_type = other RNA; note = Description of Artificial Sequence: Synthetic oligonucleotide
gtaatcaggtctttagaaata

SEQ ID NO: 26452 - RNA, 21 nt, synthetic construct
  source 1..21: mol_type = other RNA; note = Description of Artificial Sequence: Synthetic oligonucleotide
tgtaatcaggtctttagaaat

SEQ ID NO: 26453 - RNA, 21 nt, synthetic construct
  source 1..21: mol_type = other RNA; note = Description of Artificial Sequence: Synthetic oligonucleotide
atgtaatcaggtctttagaaa

SEQ ID NO: 26454 - RNA, 21 nt, synthetic construct
  source 1..21: mol_type = other RNA; note = Description of Artificial Sequence: Synthetic oligonucleotide
tatgtaatcaggtctttagaa

SEQ ID NO: 26455 - RNA, 21 nt, synthetic construct
  source 1..21: mol_type = other RNA; note = Description of Artificial Sequence: Synthetic oligonucleotide
atatgtaatcaggtctttaga

SEQ ID NO: 26456 - RNA, 21 nt, synthetic construct
  source 1..21: mol_type = other RNA; note = Description of Artificial Sequence: Synthetic oligonucleotide
tatatgtaatcaggtctttag

SEQ ID NO: 26457 - RNA, 21 nt, synthetic construct
  source 1..21: mol_type = other RNA; note = Description of Artificial Sequence: Synthetic oligonucleotide
atatatgtaatcaggtcttta

SEQ ID NO: 26458 - RNA, 21 nt, synthetic construct
  source 1..21: mol_type = other RNA; note = Description of Artificial Sequence: Synthetic oligonucleotide
catatatgtaatcaggtcttt

SEQ ID NO: 26459 - RNA, 21 nt, synthetic construct
  source 1..21: mol_type = other RNA; note = Description of Artificial Sequence: Synthetic oligonucleotide
tcatatatgtaatcaggtctt

SEQ ID NO: 26460 - RNA, 21 nt, synthetic construct
  source 1..21: mol_type = other RNA; note = Description of Artificial Sequence: Synthetic oligonucleotide
ctcatatatgtaatcaggtct

SEQ ID NO: 26461 - RNA, 21 nt, synthetic construct
  source 1..21: mol_type = other RNA; note = Description of Artificial Sequence: Synthetic oligonucleotide
actcatatatgtaatcaggtc

SEQ ID NO: 26462 - RNA, 21 nt, synthetic construct
  source 1..21: mol_type = other RNA; note = Description of Artificial Sequence: Synthetic oligonucleotide
cactcatatatgtaatcaggt

SEQ ID NO: 26463 - RNA, 21 nt, synthetic construct
  source 1..21: mol_type = other RNA; note = Description of Artificial Sequence: Synthetic oligonucleotide
ccactcatatatgtaatcagg

SEQ ID NO: 26464 - RNA, 21 nt, synthetic construct
  source 1..21: mol_type = other RNA; note = Description of Artificial Sequence: Synthetic oligonucleotide
cccactcatatatgtaatcag

SEQ ID NO: 26465 - RNA, 21 nt, synthetic construct
  source 1..21: mol_type = other RNA; note = Description of Artificial Sequence: Synthetic oligonucleotide
tcccactcatatatgtaatca

SEQ ID NO: 26466 - RNA, 21 nt, synthetic construct
  source 1..21: mol_type = other RNA; note = Description of Artificial Sequence: Synthetic oligonucleotide
gtcccactcatatatgtaatc

SEQ ID NO: 26467 - RNA, 21 nt, synthetic construct
  source 1..21: mol_type = other RNA; note = Description of Artificial Sequence: Synthetic oligonucleotide
ggtcccactcatatatgtaat

SEQ ID NO: 26468 - RNA, 21 nt, synthetic construct
  source 1..21: mol_type = other RNA; note = Description of Artificial Sequence: Synthetic oligonucleotide
tggtcccactcatatatgtaa

SEQ ID NO: 26469 - RNA, 21 nt, synthetic construct
  source 1..21: mol_type = other RNA; note = Description of Artificial Sequence: Synthetic oligonucleotide
ttggtcccactcatatatgta

SEQ ID NO: 26470 - RNA, 21 nt, synthetic construct
  source 1..21: mol_type = other RNA; note = Description of Artificial Sequence: Synthetic oligonucleotide
tttggtcccactcatatatgt

SEQ ID NO: 26471 - RNA, 21 nt, synthetic construct
  source 1..21: mol_type = other RNA; note = Description of Artificial Sequence: Synthetic oligonucleotide
ttttggtcccactcatatatg

SEQ ID NO: 26472 - RNA, 21 nt, synthetic construct
  source 1..21: mol_type = other RNA; note = Description of Artificial Sequence: Synthetic oligonucleotide
cttttggtcccactcatatat

SEQ ID NO: 26473 - RNA, 21 nt, synthetic construct
  source 1..21: mol_type = other RNA; note = Description of Artificial Sequence: Synthetic oligonucleotide
acttttggtcccactcatata

SEQ ID NO: 26474 - RNA, 21 nt, synthetic construct
  source 1..21: mol_type = other RNA; note = Description of Artificial Sequence: Synthetic oligonucleotide
tacttttggtcccactcatat

SEQ ID NO: 26475 - RNA, 21 nt, synthetic construct
  source 1..21: mol_type = other RNA; note = Description of Artificial Sequence: Synthetic oligonucleotide
gtacttttggtcccactcata

SEQ ID NO: 26476 - RNA, 21 nt, synthetic construct
  source 1..21: mol_type = other RNA; note = Description of Artificial Sequence: Synthetic oligonucleotide
ggtacttttggtcccactcat

SEQ ID NO: 26477 - RNA, 21 nt, synthetic construct
  source 1..21: mol_type = other RNA; note = Description of Artificial Sequence: Synthetic oligonucleotide
cggtacttttggtcccactca

SEQ ID NO: 26478 - RNA, 21 nt, synthetic construct
  source 1..21: mol_type = other RNA; note = Description of Artificial Sequence: Synthetic oligonucleotide
tcggtacttttggtcccactc

SEQ ID NO: 26479 - RNA, 21 nt, synthetic construct
  source 1..21: mol_type = other RNA; note = Description of Artificial Sequence: Synthetic oligonucleotide
ctcggtacttttggtcccact

SEQ ID NO: 26480 - RNA, 21 nt, synthetic construct
  source 1..21: mol_type = other RNA; note = Description of Artificial Sequence: Synthetic oligonucleotide
actcggtacttttggtcccac

SEQ ID NO: 26481 - RNA, 21 nt, synthetic construct
  source 1..21: mol_type = other RNA; note = Description of Artificial Sequence: Synthetic oligonucleotide
aactcggtacttttggtccca

SEQ ID NO: 26482 - RNA, 21 nt, synthetic construct
  source 1..21: mol_type = other RNA; note = Description of Artificial Sequence: Synthetic oligonucleotide
gaactcggtacttttggtccc

SEQ ID NO: 26483 - RNA, 21 nt, synthetic construct
  source 1..21: mol_type = other RNA; note = Description of Artificial Sequence: Synthetic oligonucleotide
tgaactcggtacttttggtcc

SEQ ID NO: 26484 - RNA, 21 nt, synthetic construct
  source 1..21: mol_type = other RNA; note = Description of Artificial Sequence: Synthetic oligonucleotide
ttgaactcggtacttttggtc

SEQ ID NO: 26485 - RNA, 21 nt, synthetic construct
  source 1..21: mol_type = other RNA; note = Description of Artificial Sequence: Synthetic oligonucleotide
gttgaactcggtacttttggt

SEQ ID NO: 26486 - RNA, 21 nt, synthetic construct
  source 1..21: mol_type = other RNA; note = Description of Artificial Sequence: Synthetic oligonucleotide
tgttgaactcggtacttttgg

SEQ ID NO: 26487 - RNA, 21 nt, synthetic construct
  source 1..21: mol_type = other RNA; note = Description of Artificial Sequence: Synthetic oligonucleotide
ttgttgaactcggtacttttg

SEQ ID NO: 26488 - RNA, 21 nt, synthetic construct
  source 1..21: mol_type = other RNA; note = Description of Artificial Sequence: Synthetic oligonucleotide
gttgttgaactcggtactttt

SEQ ID NO: 26489 - RNA, 21 nt, synthetic construct
  source 1..21: mol_type = other RNA; note = Description of Artificial Sequence: Synthetic oligonucleotide
tgttgttgaactcggtacttt

SEQ ID NO: 26490 - RNA, 21 nt, synthetic construct
  source 1..21: mol_type = other RNA; note = Description of Artificial Sequence: Synthetic oligonucleotide
gtgttgttgaactcggtactt

SEQ ID NO: 26491 - RNA, 21 nt, synthetic construct
  source 1..21: mol_type = other RNA; note = Description of Artificial Sequence: Synthetic oligonucleotide
ggtgttgttgaactcggtact

SEQ ID NO: 26492 - RNA, 21 nt, synthetic construct
  source 1..21: mol_type = other RNA; note = Description of Artificial Sequence: Synthetic oligonucleotide
cggtgttgttgaactcggtac

SEQ ID NO: 26493 - RNA, 21 nt, synthetic construct
  source 1..21: mol_type = other RNA; note = Description of Artificial Sequence: Synthetic oligonucleotide
acggtgttgttgaactcggta

SEQ ID NO: 26494 - RNA, 21 nt, synthetic construct
  source 1..21: mol_type = other RNA; note = Description of Artificial Sequence: Synthetic oligonucleotide
gacggtgttgttgaactcggt

SEQ ID NO: 26495 - RNA, 21 nt, synthetic construct
  source 1..21: mol_type = other RNA; note = Description of Artificial Sequence: Synthetic oligonucleotide
agacggtgttgttgaactcgg

SEQ ID NO: 26496 - RNA, 21 nt, synthetic construct
  source 1..21: mol_type = other RNA; note = Description of Artificial Sequence: Synthetic oligonucleotide
gagacggtgttgttgaactcg

SEQ ID NO: 26497 - RNA, 21 nt, synthetic construct
  source 1..21: mol_type = other RNA; note = Description of Artificial Sequence: Synthetic oligonucleotide
agagacggtgttgttgaactc

SEQ ID NO: 26498 - RNA, 21 nt, synthetic construct
  source 1..21: mol_type = other RNA; note = Description of Artificial Sequence: Synthetic oligonucleotide
aagagacggtgttgttgaact

SEQ ID NO: 26499 - RNA, 21 nt, synthetic construct
  source 1..21: mol_type = other RNA; note = Description of Artificial Sequence: Synthetic oligonucleotide
caagagacggtgttgttgaac

SEQ ID NO: 26500 - RNA, 21 nt, synthetic construct
  source 1..21: mol_type = other RNA; note = Description of Artificial Sequence: Synthetic oligonucleotide
acaagagacggtgttgttgaa

SEQ ID NO: 26501 - RNA, 21 nt, synthetic construct
  source 1..21: mol_type = other RNA; note = Description of Artificial Sequence: Synthetic oligonucleotide
tacaagagacggtgttgttga

SEQ ID NO: 26502 - RNA, 21 nt, synthetic construct
  source 1..21: mol_type = other RNA; note = Description of Artificial Sequence: Synthetic oligonucleotide
ctacaagagacggtgttgttg

SEQ ID NO: 26503 - RNA, 21 nt, synthetic construct
  source 1..21: mol_type = other RNA; note = Description of Artificial Sequence: Synthetic oligonucleotide
gctacaagagacggtgttgtt

SEQ ID NO: 26504 - RNA, 21 nt, synthetic construct
  source 1..21: mol_type = other RNA; note = Description of Artificial Sequence: Synthetic oligonucleotide
tgctacaagagacggtgttgt

SEQ ID NO: 26505 - RNA, 21 nt, synthetic construct
  source 1..21: mol_type = other RNA; note = Description of Artificial Sequence: Synthetic oligonucleotide
ttgctacaagagacggtgttg

SEQ ID NO: 26506 - RNA, 21 nt, synthetic construct
  source 1..21: mol_type = other RNA; note = Description of Artificial Sequence: Synthetic oligonucleotide
attgctacaagagacggtgtt

SEQ ID NO: 26507 - RNA, 21 nt, synthetic construct
  source 1..21: mol_type = other RNA; note = Description of Artificial Sequence: Synthetic oligonucleotide
gattgctacaagagacggtgt

SEQ ID NO: 26508 - RNA, 21 nt, synthetic construct
  source 1..21: mol_type = other RNA; note = Description of Artificial Sequence: Synthetic oligonucleotide
cgattgctacaagagacggtg

SEQ ID NO: 26509 - RNA, 21 nt, synthetic construct
  source 1..21: mol_type = other RNA; note = Description of Artificial Sequence: Synthetic oligonucleotide
ccgattgctacaagagacggt

SEQ ID NO: 26510 - RNA, 21 nt, synthetic construct
  source 1..21: mol_type = other RNA; note = Description of Artificial Sequence: Synthetic oligonucleotide
gccgattgctacaagagacgg

SEQ ID NO: 26511 - RNA, 21 nt, synthetic construct
  source 1..21: mol_type = other RNA; note = Description of Artificial Sequence: Synthetic oligonucleotide
ggccgattgctacaagagacg

SEQ ID NO: 26512 - RNA, 21 nt, synthetic construct
  source 1..21: mol_type = other RNA; note = Description of Artificial Sequence: Synthetic oligonucleotide
tggccgattgctacaagagac

SEQ ID NO: 26513 - RNA, 21 nt, synthetic construct
  source 1..21: mol_type = other RNA; note = Description of Artificial Sequence: Synthetic oligonucleotide
gtggccgattgctacaagaga

SEQ ID NO: 26514 - RNA, 21 nt, synthetic construct
  source 1..21: mol_type = other RNA; note = Description of Artificial Sequence: Synthetic oligonucleotide
tgtggccgattgctacaagag

SEQ ID NO: 26515 - RNA, 21 nt, synthetic construct
  source 1..21: mol_type = other RNA; note = Description of Artificial Sequence: Synthetic oligonucleotide
atgtggccgattgctacaaga

SEQ ID NO: 26516 - RNA, 21 nt, synthetic construct
  source 1..21: mol_type = other RNA; note = Description of Artificial Sequence: Synthetic oligonucleotide
aatgtggccgattgctacaag

SEQ ID NO: 26517 - RNA, 21 nt, synthetic construct
  source 1..21: mol_type = other RNA; note = Description of Artificial Sequence: Synthetic oligonucleotide
caatgtggccgattgctacaa

SEQ ID NO: 26518 - RNA, 21 nt, synthetic construct
  source 1..21: mol_type = other RNA; note = Description of Artificial Sequence: Synthetic oligonucleotide
gcaatgtggccgattgctaca

SEQ ID NO: 26519 - RNA, 21 nt, synthetic construct
  source 1..21: mol_type = other RNA; note = Description of Artificial Sequence: Synthetic oligonucleotide
ggcaatgtggccgattgctac

SEQ ID NO: 26520 - RNA, 21 nt, synthetic construct
  source 1..21: mol_type = other RNA; note = Description of Artificial Sequence: Synthetic oligonucleotide
aggcaatgtggccgattgcta

SEQ ID NO: 26521 - RNA, 21 nt, synthetic construct
  source 1..21: mol_type = other RNA; note = Description of Artificial Sequence: Synthetic oligonucleotide
aaggcaatgtggccgattgct

SEQ ID NO: 26522 - RNA, 21 nt, synthetic construct
  source 1..21: mol_type = other RNA; note = Description of Artificial Sequence: Synthetic oligonucleotide
taaggcaatgtggccgattgc

SEQ ID NO: 26523 - RNA, 21 nt, synthetic construct
  source 1..21: mol_type = other RNA; note = Description of Artificial Sequence: Synthetic oligonucleotide
gtaaggcaatgtggccgattg

SEQ ID NO: 26524 - RNA, 21 nt, synthetic construct
  source 1..21: mol_type = other RNA; note = Description of Artificial Sequence: Synthetic oligonucleotide
agtaaggcaatgtggccgatt

SEQ ID NO: 26525 - RNA, 21 nt, synthetic construct
  source 1..21: mol_type = other RNA; note = Description of Artificial Sequence: Synthetic oligonucleotide
cagtaaggcaatgtggccgat

SEQ ID NO: 26526 - RNA, 21 nt, synthetic construct
  source 1..21: mol_type = other RNA; note = Description of Artificial Sequence: Synthetic oligonucleotide
tcagtaaggcaatgtggccga

SEQ ID NO: 26527 - RNA, 21 nt, synthetic construct
  source 1..21: mol_type = other RNA; note = Description of Artificial Sequence: Synthetic oligonucleotide
ttcagtaaggcaatgtggccg

SEQ ID NO: 26528 - RNA, 21 nt, synthetic construct
  source 1..21: mol_type = other RNA; note = Description of Artificial Sequence: Synthetic oligonucleotide
tttcagtaaggcaatgtggcc

SEQ ID NO: 26529 - RNA, 21 nt, synthetic construct
  source 1..21: mol_type = other RNA; note = Description of Artificial Sequence: Synthetic oligonucleotide
atttcagtaaggcaatgtggc

SEQ ID NO: 26530 - RNA, 21 nt, synthetic construct
  source 1..21: mol_type = other RNA; note = Description of Artificial Sequence: Synthetic oligonucleotide
gatttcagtaaggcaatgtgg

SEQ ID NO: 26531 - RNA, 21 nt, synthetic construct
  source 1..21: mol_type = other RNA; note = Description of Artificial Sequence: Synthetic oligonucleotide
ggatttcagtaaggcaatgtg

SEQ ID NO: 26532 - RNA, 21 nt, synthetic construct
  source 1..21: mol_type = other RNA; note = Description of Artificial Sequence: Synthetic oligonucleotide
tggatttcagtaaggcaatgt

SEQ ID NO: 26533 - RNA, 21 nt, synthetic construct
  source 1..21: mol_type = other RNA; note = Description of Artificial Sequence: Synthetic oligonucleotide
ctggatttcagtaaggcaatg

SEQ ID NO: 26534 - RNA, 21 nt, synthetic construct
  source 1..21: mol_type = other RNA; note = Description of Artificial Sequence: Synthetic oligonucleotide
tctggatttcagtaaggcaat

SEQ ID NO: 26535 - RNA, 21 nt, synthetic construct
  source 1..21: mol_type = other RNA; note = Description of Artificial Sequence: Synthetic oligonucleotide
ctctggatttcagtaaggcaa

SEQ ID NO: 26536 - RNA, 21 nt, synthetic construct
  source 1..21: mol_type = other RNA; note = Description of Artificial Sequence: Synthetic oligonucleotide
gctctggatttcagtaaggca

SEQ ID NO: 26537 - RNA, 21 nt, synthetic construct
  source 1..21: mol_type = other RNA; note = Description of Artificial Sequence: Synthetic oligonucleotide
ggctctggatttcagtaaggc

SEQ ID NO: 26538 - RNA, 21 nt, synthetic construct
  source 1..21: mol_type = other RNA; note = Description of Artificial Sequence: Synthetic oligonucleotide
aggctctggatttcagtaagg

SEQ ID NO: 26539 - RNA, 21 nt, synthetic construct
  source 1..21: mol_type = other RNA; note = Description of Artificial Sequence: Synthetic oligonucleotide
taggctctggatttcagtaag

SEQ ID NO: 26540 - RNA, 21 nt, synthetic construct
  source 1..21: mol_type = other RNA; note = Description of Artificial Sequence: Synthetic oligonucleotide
ttaggctctggatttcagtaa

SEQ ID NO: 26541 - RNA, 21 nt, synthetic construct
  source 1..21: mol_type = other RNA; note = Description of Artificial Sequence: Synthetic oligonucleotide
gttaggctctggatttcagta

SEQ ID NO: 26542 - RNA, 21 nt, synthetic construct
  source 1..21: mol_type = other RNA; note = Description of Artificial Sequence: Synthetic oligonucleotide
ggttaggctctggatttcagt

SEQ ID NO: 26543 - RNA, 21 nt, synthetic construct
  source 1..21: mol_type = other RNA; note = Description of Artificial Sequence: Synthetic oligonucleotide
aggttaggctctggatttcag

SEQ ID NO: 26544 - RNA, 21 nt, synthetic construct
  source 1..21: mol_type = other RNA; note = Description of Artificial Sequence: Synthetic oligonucleotide
aaggttaggctctggatttca

SEQ ID NO: 26545 - RNA, 21 nt, synthetic construct
  source 1..21: mol_type = other RNA; note = Description of Artificial Sequence: Synthetic oligonucleotide
gaaggttaggctctggatttc

SEQ ID NO: 26546 - RNA, 21 nt, synthetic construct
  source 1..21: mol_type = other RNA; note = Description of Artificial Sequence: Synthetic oligonucleotide
tgaaggttaggctctggattt

SEQ ID NO: 26547 - RNA, 21 nt, synthetic construct
  source 1..21: mol_type = other RNA; note = Description of Artificial Sequence: Synthetic oligonucleotide
ttgaaggttaggctctggatt

SEQ ID NO: 26548 - RNA, 21 nt, synthetic construct
  source 1..21: mol_type = other RNA; note = Description of Artificial Sequence: Synthetic oligonucleotide
attgaaggttaggctctggat

SEQ ID NO: 26549 - RNA, 21 nt, synthetic construct
  source 1..21: mol_type = other RNA; note = Description of Artificial Sequence: Synthetic oligonucleotide
gattgaaggttaggctctgga

SEQ ID NO: 26550 - RNA, 21 nt, synthetic construct
  source 1..21: mol_type = other RNA; note = Description of Artificial Sequence: Synthetic oligonucleotide
ggattgaaggttaggctctgg

SEQ ID NO: 26551 - RNA, 21 nt, synthetic construct
  source 1..21: mol_type = other RNA; note = Description of Artificial Sequence: Synthetic oligonucleotide
gggattgaaggttaggctctg

SEQ ID NO: 26552 - RNA, 21 nt, synthetic construct
  source 1..21: mol_type = other RNA; note = Description of Artificial Sequence: Synthetic oligonucleotide
tgggattgaaggttaggctct

SEQ ID NO: 26553 - RNA, 21 nt, synthetic construct
  source 1..21: mol_type = other RNA; note = Description of Artificial Sequence: Synthetic oligonucleotide
gtgggattgaaggttaggctc

SEQ ID NO: 26554 - RNA, 21 nt, synthetic construct
  source 1..21: mol_type = other RNA; note = Description of Artificial Sequence: Synthetic oligonucleotide
ggtgggattgaaggttaggct

SEQ ID NO: 26555 - RNA, 21 nt, synthetic construct
  source 1..21: mol_type = other RNA; note = Description of Artificial Sequence: Synthetic oligonucleotide
cggtgggattgaaggttaggc

SEQ ID NO: 26556 - RNA, 21 nt, synthetic construct
  source 1..21: mol_type = other RNA; note = Description of Artificial Sequence: Synthetic oligonucleotide
gcggtgggattgaaggttagg

SEQ ID NO: 26557 - RNA, 21 nt, synthetic construct
  source 1..21: mol_type = other RNA; note = Description of Artificial Sequence: Synthetic oligonucleotide
ggcggtgggattgaaggttag

SEQ ID NO: 26558 - RNA, 21 nt, synthetic construct
  source 1..21: mol_type = other RNA; note = Description of Artificial Sequence: Synthetic oligonucleotide
cggcggtgggattgaaggtta

SEQ ID NO: 26559 - RNA, 21 nt, synthetic construct
  source 1..21: mol_type = other RNA; note = Description of Artificial Sequence: Synthetic oligonucleotide
ccggcggtgggattgaaggtt

SEQ ID NO: 26560 - RNA, 21 nt, synthetic construct
  source 1..21: mol_type = other RNA; note = Description of Artificial Sequence: Synthetic oligonucleotide
gccggcggtgggattgaaggt

SEQ ID NO: 26561 - RNA, 21 nt, synthetic construct
  source 1..21: mol_type = other RNA; note = Description of Artificial Sequence: Synthetic oligonucleotide
agccggcggtgggattgaagg

SEQ ID NO: 26562 - RNA, 21 nt, synthetic construct
  source 1..21: mol_type = other RNA; note = Description of Artificial Sequence: Synthetic oligonucleotide
cagccggcggtgggattgaag

SEQ ID NO: 26563 - RNA, 21 nt, synthetic construct
  source 1..21: mol_type = other RNA; note = Description of Artificial Sequence: Synthetic oligonucleotide
gcagccggcggtgggattgaa

SEQ ID NO: 26564 - RNA, 21 nt, synthetic construct
  source 1..21: mol_type = other RNA; note = Description of Artificial Sequence: Synthetic oligonucleotide
cgcagccggcggtgggattga

SEQ ID NO: 26565 - RNA, 21 nt, synthetic construct
  source 1..21: mol_type = other RNA; note = Description of Artificial Sequence: Synthetic oligonucleotide
gcgcagccggcggtgggattg

SEQ ID NO: 26566 - RNA, 21 nt, synthetic construct
  source 1..21: mol_type = other RNA; note = Description of Artificial Sequence: Synthetic oligonucleotide
cgcgcagccggcggtgggatt

SEQ ID NO: 26567 - RNA, 21 nt, synthetic construct
  source 1..21: mol_type = other RNA; note = Description of Artificial Sequence: Synthetic oligonucleotide
acgcgcagccggcggtgggat

SEQ ID NO: 26568 - RNA, 21 nt, synthetic construct
  source 1..21: mol_type = other RNA; note = Description of Artificial Sequence: Synthetic oligonucleotide
gacgcgcagccggcggtggga

SEQ ID NO: 26569 - RNA, 21 nt, synthetic construct
  source 1..21: mol_type = other RNA; note = Description of Artificial Sequence: Synthetic oligonucleotide
cgacgcgcagccggcggtggg

SEQ ID NO: 26570 - RNA, 21 nt, synthetic construct
  source 1..21: mol_type = other RNA; note = Description of Artificial Sequence: Synthetic oligonucleotide
gcgacgcgcagccggcggtgg

SEQ ID NO: 26571 - RNA, 21 nt, synthetic construct
  source 1..21: mol_type = other RNA; note = Description of Artificial Sequence: Synthetic oligonucleotide
agcgacgcgcagccggcggtg

SEQ ID NO: 26572 - RNA, 21 nt, synthetic construct
  source 1..21: mol_type = other RNA; note = Description of Artificial Sequence: Synthetic oligonucleotide
gagcgacgcgcagccggcggt

SEQ ID NO: 26573 - RNA, 21 nt, synthetic construct
  source 1..21: mol_type = other RNA; note = Description of Artificial Sequence: Synthetic oligonucleotide
cgagcgacgcgcagccggcgg

SEQ ID NO: 26574 - RNA, 21 nt, synthetic construct
  source 1..21: mol_type = other RNA; note = Description of Artificial Sequence: Synthetic oligonucleotide
gcgagcgacgcgcagccggcg

SEQ ID NO: 26575 - RNA, 21 nt, synthetic construct
  source 1..21: mol_type = other RNA; note = Description of Artificial Sequence: Synthetic oligonucleotide
ggcgagcgacgcgcagccggc

SEQ ID NO: 26576 - RNA, 21 nt, synthetic construct
  source 1..21: mol_type = other RNA; note = Description of Artificial Sequence: Synthetic oligonucleotide
tggcgagcgacgcgcagccgg

SEQ ID NO: 26577 - RNA, 21 nt, synthetic construct
  source 1..21: mol_type = other RNA; note = Description of Artificial Sequence: Synthetic oligonucleotide
ttggcgagcgacgcgcagccg

SEQ ID NO: 26578 - RNA, 21 nt, synthetic construct
  source 1..21: mol_type = other RNA; note = Description of Artificial Sequence: Synthetic oligonucleotide
tttggcgagcgacgcgcagcc

SEQ ID NO: 26579 - RNA, 21 nt, synthetic construct
  source 1..21: mol_type = other RNA; note = Description of Artificial Sequence: Synthetic oligonucleotide
ctttggcgagcgacgcgcagc

SEQ ID NO: 26580 - RNA, 21 nt, synthetic construct
  source 1..21: mol_type = other RNA; note = Description of Artificial Sequence: Synthetic oligonucleotide
tctttggcgagcgacgcgcag

SEQ ID NO: 26581 - RNA, 21 nt, synthetic construct
  source 1..21: mol_type = other RNA; note = Description of Artificial Sequence: Synthetic oligonucleotide
ttctttggcgagcgacgcgca

SEQ ID NO: 26582 - RNA, 21 nt, synthetic construct
  source 1..21: mol_type = other RNA; note = Description of Artificial Sequence: Synthetic oligonucleotide
tttctttggcgagcgacgcgc

SEQ ID NO: 26583 - RNA, 21 nt, synthetic construct
  source 1..21: mol_type = other RNA; note = Description of Artificial Sequence: Synthetic oligonucleotide
atttctttggcgagcgacgcg

SEQ ID NO: 26584 - RNA, 21 nt, synthetic construct
  source 1..21: mol_type = other RNA; note = Description of Artificial Sequence: Synthetic oligonucleotide
catttctttggcgagcgacgc

SEQ ID NO: 26585 - RNA, 21 nt, synthetic construct
  source 1..21: mol_type = other RNA; note = Description of Artificial Sequence: Synthetic oligonucleotide
acatttctttggcgagcgacg

SEQ ID NO: 26586 - RNA, 21 nt, synthetic construct
  source 1..21: mol_type = other RNA; note = Description of Artificial Sequence: Synthetic oligonucleotide
aacatttctttggcgagcgac

SEQ ID NO: 26587 - RNA, 21 nt, synthetic construct
  source 1..21: mol_type = other RNA; note = Description of Artificial Sequence: Synthetic oligonucleotide
gaacatttctttggcgagcga

SEQ ID NO: 26588 - RNA, 21 nt, synthetic construct
  source 1..21: mol_type = other RNA; note = Description of Artificial Sequence: Synthetic oligonucleotide
cgaacatttctttggcgagcg

SEQ ID NO: 26589 - RNA, 21 nt, synthetic construct
  source 1..21: mol_type = other RNA; note = Description of Artificial Sequence: Synthetic oligonucleotide
gcgaacatttctttggcgagc

SEQ ID NO: 26590 - RNA, 21 nt, synthetic construct
  source 1..21: mol_type = other RNA; note = Description of Artificial Sequence: Synthetic oligonucleotide
ggcgaacatttctttggcgag

SEQ ID NO: 26591 - RNA, 21 nt, synthetic construct
  source 1..21: mol_type = other RNA; note = Description of Artificial Sequence: Synthetic oligonucleotide
tggcgaacatttctttggcga

SEQ ID NO: 26592 - RNA, 21 nt, synthetic construct
  source 1..21: mol_type = other RNA; note = Description of Artificial Sequence: Synthetic oligonucleotide
atggcgaacatttctttggcg

SEQ ID NO: 26593 - RNA, 21 nt, synthetic construct
  source 1..21: mol_type = other RNA; note = Description of Artificial Sequence: Synthetic oligonucleotide
catggcgaacatttctttggc

SEQ ID NO: 26594 - RNA, 21 nt, synthetic construct
  source 1..21: mol_type = other RNA; note = Description of Artificial Sequence: Synthetic oligonucleotide
tcatggcgaacatttctttgg

SEQ ID NO: 26595 - RNA, 21 nt, synthetic construct
  source 1..21: mol_type = other RNA; note = Description of Artificial Sequence: Synthetic oligonucleotide
ttcatggcgaacatttctttg

SEQ ID NO: 26596 - RNA, 21 nt, synthetic construct
  source 1..21: mol_type = other RNA; note = Description of Artificial Sequence: Synthetic oligonucleotide
tttcatggcgaacatttcttt

SEQ ID NO: 26597 - RNA, 21 nt, synthetic construct
  source 1..21: mol_type = other RNA; note = Description of Artificial Sequence: Synthetic oligonucleotide
ttttcatggcgaacatttctt

SEQ ID NO: 26598 - RNA, 21 nt, synthetic construct
  source 1..21: mol_type = other RNA; note = Description of Artificial Sequence: Synthetic oligonucleotide
gttttcatggcgaacatttct

SEQ ID NO: 26599 - RNA, 21 nt, synthetic construct
  source 1..21: mol_type = other RNA; note = Description of Artificial Sequence: Synthetic oligonucleotide
agttttcatggcgaacatttc

SEQ ID NO: 26600 - RNA, 21 nt, synthetic construct
  source 1..21: mol_type = other RNA; note = Description of Artificial Sequence: Synthetic oligonucleotide
tagttttcatggcgaacattt

SEQ ID NO: 26601 - RNA, 21 nt, synthetic construct
  source 1..21: mol_type = other RNA; note = Description of Artificial Sequence: Synthetic oligonucleotide
ttagttttcatggcgaacatt

SEQ ID NO: 26602 - RNA, 21 nt, synthetic construct
  source 1..21: mol_type = other RNA; note = Description of Artificial Sequence: Synthetic oligonucleotide
cttagttttcatggcgaacat

SEQ ID NO: 26603 - RNA, 21 nt, synthetic construct
  source 1..21: mol_type = other RNA; note = Description of Artificial Sequence: Synthetic oligonucleotide
ccttagttttcatggcgaaca

SEQ ID NO: 26604 - RNA, 21 nt, synthetic construct
  source 1..21: mol_type = other RNA; note = Description of Artificial Sequence: Synthetic oligonucleotide
gccttagttttcatggcgaac

SEQ ID NO: 26605 - RNA, 21 nt, synthetic construct
  source 1..21: mol_type = other RNA; note = Description of Artificial Sequence: Synthetic oligonucleotide
agccttagttttcatggcgaa

SEQ ID NO: 26606 - RNA, 21 nt, synthetic construct
  source 1..21: mol_type = other RNA; note = Description of Artificial Sequence: Synthetic oligonucleotide
cagccttagttttcatggcga

SEQ ID NO: 26607 - RNA, 21 nt, synthetic construct
  source 1..21: mol_type = other RNA; note = Description of Artificial Sequence: Synthetic oligonucleotide
gcagccttagttttcatggcg

SEQ ID NO: 26608 - RNA, 21 nt, synthetic construct
  source 1..21: mol_type = other RNA; note = Description of Artificial Sequence: Synthetic oligonucleotide
ggcagccttagttttcatggc

SEQ ID NO: 26609 - RNA, 21 nt, synthetic construct
  source 1..21: mol_type = other RNA; note = Description of Artificial Sequence: Synthetic oligonucleotide
aggcagccttagttttcatgg

SEQ ID NO: 26610 - RNA, 21 nt, synthetic construct
  source 1..21: mol_type = other RNA; note = Description of Artificial Sequence: Synthetic oligonucleotide
aaggcagccttagttttcatg

SEQ ID NO: 26611 - RNA, 21 nt, synthetic construct
  source 1..21: mol_type = other RNA; note = Description of Artificial Sequence: Synthetic oligonucleotide
taaggcagccttagttttcat

SEQ ID NO: 26612 - RNA, 21 nt, synthetic construct
  source 1..21: mol_type = other RNA; note = Description of Artificial Sequence: Synthetic oligonucleotide
ctaaggcagccttagttttca

SEQ ID NO: 26613 - RNA, 21 nt, synthetic construct
  source 1..21: mol_type = other RNA; note = Description of Artificial Sequence: Synthetic oligonucleotide
gctaaggcagccttagttttc

SEQ ID NO: 26614 - RNA, 21 nt, synthetic construct
  source 1..21: mol_type = other RNA; note = Description of Artificial Sequence: Synthetic oligonucleotide
agctaaggcagccttagtttt

SEQ ID NO: 26615 - RNA, 21 nt, synthetic construct
  source 1..21: mol_type = other RNA; note = Description of Artificial Sequence: Synthetic oligonucleotide
tagctaaggcagccttagttt

SEQ ID NO: 26616 - RNA, 21 nt, synthetic construct
  source 1..21: mol_type = other RNA; note = Description of Artificial Sequence: Synthetic oligonucleotide
atagctaaggcagccttagtt

SEQ ID NO: 26617 - RNA, 21 nt, synthetic construct
  source 1..21: mol_type = other RNA; note = Description of Artificial Sequence: Synthetic oligonucleotide
gatagctaaggcagccttagt

SEQ ID NO: 26618 - RNA, 21 nt, synthetic construct
  source 1..21: mol_type = other RNA; note = Description of Artificial Sequence: Synthetic oligonucleotide
agatagctaaggcagccttag

SEQ ID NO: 26619 - RNA, 21 nt, synthetic construct
  source 1..21: mol_type = other RNA; note = Description of Artificial Sequence: Synthetic oligonucleotide
cagatagctaaggcagcctta

SEQ ID NO: 26620 - RNA, 21 nt, synthetic construct
  source 1..21: mol_type = other RNA; note = Description of Artificial Sequence: Synthetic oligonucleotide
ccagatagctaaggcagcctt

SEQ ID NO: 26621 - RNA, 21 nt, synthetic construct
  source 1..21: mol_type = other RNA; note = Description of Artificial Sequence: Synthetic oligonucleotide
accagatagctaaggcagcct

SEQ ID NO: 26622 - RNA, 21 nt, synthetic construct
  source 1..21: mol_type = other RNA; note = Description of Artificial Sequence: Synthetic oligonucleotide
caccagatagctaaggcagcc

SEQ ID NO: 26623 - RNA, 21 nt, synthetic construct
  source 1..21: mol_type = other RNA; note = Description of Artificial Sequence: Synthetic oligonucleotide
gcaccagatagctaaggcagc

SEQ ID NO: 26624 - RNA, 21 nt, synthetic construct
  source 1..21: mol_type = other RNA; note = Description of Artificial Sequence: Synthetic oligonucleotide
ggcaccagatagctaaggcag

SEQ ID NO: 26625 - RNA, 21 nt, synthetic construct
  source 1..21: mol_type = other RNA; note = Description of Artificial Sequence: Synthetic oligonucleotide
gggcaccagatagctaaggca

SEQ ID NO: 26626 - RNA, 21 nt, synthetic construct
  source 1..21: mol_type = other RNA; note = Description of Artificial Sequence: Synthetic oligonucleotide
tgggcaccagatagctaaggc

SEQ ID NO: 26627 - RNA, 21 nt, synthetic construct
  source 1..21: mol_type = other RNA; note = Description of Artificial Sequence: Synthetic oligonucleotide
ctgggcaccagatagctaagg

SEQ ID NO: 26628 - RNA, 21 nt, synthetic construct
  source 1..21: mol_type = other RNA; note = Description of Artificial Sequence: Synthetic oligonucleotide
cctgggcaccagatagctaag

SEQ ID NO: 26629 - RNA, 21 nt, synthetic construct
  source 1..21: mol_type = other RNA; note = Description of Artificial Sequence: Synthetic oligonucleotide
gcctgggcaccagatagctaa

SEQ ID NO: 26630 - RNA, 21 nt, synthetic construct
  source 1..21: mol_type = other RNA; note = Description of Artificial Sequence: Synthetic oligonucleotide
agcctgggcaccagatagcta

SEQ ID NO: 26631 - RNA, 21 nt, synthetic construct
  source 1..21: mol_type = other RNA; note = Description of Artificial Sequence: Synthetic oligonucleotide
tagcctgggcaccagatagct

SEQ ID NO: 26632 - RNA, 21 nt, synthetic construct
  source 1..21: mol_type = other RNA; note = Description of Artificial Sequence: Synthetic oligonucleotide
atagcctgggcaccagatagc

SEQ ID NO: 26633 - RNA, 21 nt, synthetic construct
  source 1..21: mol_type = other RNA; note = Description of Artificial Sequence: Synthetic oligonucleotide
aatagcctgggcaccagatag

SEQ ID NO: 26634 - RNA, 21 nt, synthetic construct
  source 1..21: mol_type = other RNA; note = Description of Artificial Sequence: Synthetic oligonucleotide
gaatagcctgggcaccagata

SEQ ID NO: 26635 - RNA, 21 nt, synthetic construct
  source 1..21: mol_type = other RNA; note = Description of Artificial Sequence: Synthetic oligonucleotide
cgaatagcctgggcaccagat

SEQ ID NO: 26636 - RNA, 21 nt, synthetic construct
  source 1..21: mol_type = other RNA; note = Description of Artificial Sequence: Synthetic oligonucleotide
ccgaatagcctgggcaccaga

SEQ ID NO: 26637 - RNA, 21 nt, synthetic construct
  source 1..21: mol_type = other RNA; note = Description of Artificial Sequence: Synthetic oligonucleotide
tccgaatagcctgggcaccag

SEQ ID NO: 26638 - RNA, 21 nt, synthetic construct
  source 1..21: mol_type = other RNA; note = Description of Artificial Sequence: Synthetic oligonucleotide
ttccgaatagcctgggcacca

SEQ ID NO: 26639 - RNA, 21 nt, synthetic construct
  source 1..21: mol_type = other RNA; note = Description of Artificial Sequence: Synthetic oligonucleotide
tttccgaatagcctgggcacc

SEQ ID NO: 26640 - RNA, 21 nt, synthetic construct
  source 1..21: mol_type = other RNA; note = Description of Artificial Sequence: Synthetic oligonucleotide
gtttccgaatagcctgggcac

SEQ ID NO: 26641 - RNA, 21 nt, synthetic construct
  source 1..21: mol_type = other RNA; note = Description of Artificial Sequence: Synthetic oligonucleotide
agtttccgaatagcctgggca

SEQ ID NO: 26642 - RNA, 21 nt, synthetic construct
  source 1..21: mol_type = other RNA; note = Description of Artificial Sequence: Synthetic oligonucleotide
gagtttccgaatagcctgggc

SEQ ID NO: 26643 - RNA, 21 nt, synthetic construct
  source 1..21: mol_type = other RNA; note = Description of Artificial Sequence: Synthetic oligonucleotide
tgagtttccgaatagcctggg

SEQ ID NO: 26644 - RNA, 21 nt, synthetic construct
  source 1..21: mol_type = other RNA; note = Description of Artificial Sequence: Synthetic oligonucleotide
ctgagtttccgaatagcctgg

SEQ ID NO: 26645 - RNA, 21 nt, synthetic construct
  source 1..21: mol_type = other RNA; note = Description of Artificial Sequence: Synthetic oligonucleotide
tctgagtttccgaatagcctg

SEQ ID NO: 26646 - RNA, 21 nt, synthetic construct
  source 1..21: mol_type = other RNA; note = Description of Artificial Sequence: Synthetic oligonucleotide
atctgagtttccgaatagcct

SEQ ID NO: 26647 - RNA, 21 nt, synthetic construct
  source 1..21: mol_type = other RNA; note = Description of Artificial Sequence: Synthetic oligonucleotide
tatctgagtttccgaatagcc

SEQ ID NO: 26648 - RNA, 21 nt, synthetic construct
  source 1..21: mol_type = other RNA; note = Description of Artificial Sequence: Synthetic oligonucleotide
ttatctgagtttccgaatagc

SEQ ID NO: 26649 - RNA, 21 nt, synthetic construct
  source 1..21: mol_type = other RNA; note = Description of Artificial Sequence: Synthetic oligonucleotide
tttatctgagtttccgaatag

SEQ ID NO: 26650 - RNA, 21 nt, synthetic construct
  source 1..21: mol_type = other RNA; note = Description of Artificial Sequence: Synthetic oligonucleotide
atttatctgagtttccgaata

SEQ ID NO: 26651 - RNA, 21 nt, synthetic construct
  source 1..21: mol_type = other RNA; note = Description of Artificial Sequence: Synthetic oligonucleotide
catttatctgagtttccgaat

SEQ ID NO: 26652 - RNA, 21 nt, synthetic construct
  source 1..21: mol_type = other RNA; note = Description of Artificial Sequence: Synthetic oligonucleotide
gcatttatctgagtttccgaa

SEQ ID NO: 26653 - RNA, 21 nt, synthetic construct
  source 1..21: mol_type = other RNA; note = Description of Artificial Sequence: Synthetic oligonucleotide
agcatttatctgagtttccga

SEQ ID NO: 26654 - RNA, 21 nt, synthetic construct
  source 1..21: mol_type = other RNA; note = Description of Artificial Sequence: Synthetic oligonucleotide
tagcatttatctgagtttccg

SEQ ID NO: 26655 - RNA, 21 nt, synthetic construct
  source 1..21: mol_type = other RNA; note = Description of Artificial Sequence: Synthetic oligonucleotide
gtagcatttatctgagtttcc

SEQ ID NO: 26656 - RNA, 21 nt, synthetic construct
  source 1..21: mol_type = other RNA; note = Description of Artificial Sequence: Synthetic oligonucleotide
agtagcatttatctgagtttc

SEQ ID NO: 26657 - RNA, 21 nt, synthetic construct
  source 1..21: mol_type = other RNA; note = Description of Artificial Sequence: Synthetic oligonucleotide
gagtagcatttatctgagttt

SEQ ID NO: 26658 - RNA, 21 nt, synthetic construct
  source 1..21: mol_type = other RNA; note = Description of Artificial Sequence: Synthetic oligonucleotide
tgagtagcatttatctgagtt

SEQ ID NO: 26659 - RNA, 21 nt, synthetic construct
  source 1..21: mol_type = other RNA; note = Description of Artificial Sequence: Synthetic oligonucleotide
ctgagtagcatttatctgagt

SEQ ID NO: 26660 - RNA, 21 nt, synthetic construct
  source 1..21: mol_type = other RNA; note = Description of Artificial Sequence: Synthetic oligonucleotide
cctgagtagcatttatctgag

SEQ ID NO: 26661 - RNA, 21 nt, synthetic construct
  source 1..21: mol_type = other RNA; note = Description of Artificial Sequence: Synthetic oligonucleotide
gcctgagtagcatttatctga

SEQ ID NO: 26662 - RNA, 21 nt, synthetic construct
  source 1..21: mol_type = other RNA; note = Description of Artificial Sequence: Synthetic oligonucleotide
tgcctgagtagcatttatctg

SEQ ID NO: 26663 - RNA, 21 nt, synthetic construct
  source 1..21: mol_type = other RNA; note = Description of Artificial Sequence: Synthetic oligonucleotide
ttgcctgagtagcatttatct

SEQ ID NO: 26664 - RNA, 21 nt, synthetic construct
  source 1..21: mol_type = other RNA; note = Description of Artificial Sequence: Synthetic oligonucleotide
attgcctgagtagcatttatc

SEQ ID NO: 26665 - RNA, 21 nt, synthetic construct
  source 1..21: mol_type = other RNA; note = Description of Artificial Sequence: Synthetic oligonucleotide
cattgcctgagtagcatttat

SEQ ID NO: 26666 - RNA, 21 nt, synthetic construct
  source 1..21: mol_type = other RNA; note = Description of Artificial Sequence: Synthetic oligonucleotide
tcattgcctgagtagcattta

SEQ ID NO: 26667 - RNA, 21 nt, synthetic construct
  source 1..21: mol_type = other RNA; note = Description of Artificial Sequence: Synthetic oligonucleotide
ttcattgcctgagtagcattt

SEQ ID NO: 26668 - RNA, 21 nt, synthetic construct
  source 1..21: mol_type = other RNA; note = Description of Artificial Sequence: Synthetic oligonucleotide
cttcattgcctgagtagcatt

SEQ ID NO: 26669 - RNA, 21 nt, synthetic construct
  source 1..21: mol_type = other RNA; note = Description of Artificial Sequence: Synthetic oligonucleotide
tcttcattgcctgagtagcat

SEQ ID NO: 26670 - RNA, 21 nt, synthetic construct
  source 1..21: mol_type = other RNA; note = Description of Artificial Sequence: Synthetic oligonucleotide
ttcttcattgcctgagtagca

SEQ ID NO: 26671 - RNA, 21 nt, synthetic construct
  source 1..21: mol_type = other RNA; note = Description of Artificial Sequence: Synthetic oligonucleotide
cttcttcattgcctgagtagc

SEQ ID NO: 26672 - RNA, 21 nt, synthetic construct
  source 1..21: mol_type = other RNA; note = Description of Artificial Sequence: Synthetic oligonucleotide
tcttcttcattgcctgagtag

SEQ ID NO: 26673 - RNA, 21 nt, synthetic construct
  source 1..21: mol_type = other RNA; note = Description of Artificial Sequence: Synthetic oligonucleotide
ctcttcttcattgcctgagta

SEQ ID NO: 26674 - RNA, 21 nt, synthetic construct
  source 1..21: mol_type = other RNA; note = Description of Artificial Sequence: Synthetic oligonucleotide
cctcttcttcattgcctgagt

SEQ ID NO: 26675 - RNA, 21 nt, synthetic construct
  source 1..21: mol_type = other RNA; note = Description of Artificial Sequence: Synthetic oligonucleotide
tcctcttcttcattgcctgag

SEQ ID NO: 26676 - RNA, 21 nt, synthetic construct
  source 1..21: mol_type = other RNA; note = Description of Artificial Sequence: Synthetic oligonucleotide
ctcctcttcttcattgcctga

SEQ ID NO: 26677 - RNA, 21 nt, synthetic construct
  source 1..21: mol_type = other RNA; note = Description of Artificial Sequence: Synthetic oligonucleotide
tctcctcttcttcattgcctg

SEQ ID NO: 26678 - RNA, 21 nt, synthetic construct
  source 1..21: mol_type = other RNA; note = Description of Artificial Sequence: Synthetic oligonucleotide
ttctcctcttcttcattgcct

SEQ ID NO: 26679 - RNA, 21 nt, synthetic construct
  source 1..21: mol_type = other RNA; note = Description of Artificial Sequence: Synthetic oligonucleotide
tttctcctcttcttcattgcc

SEQ ID NO: 26680 - RNA, 21 nt, synthetic construct
  source 1..21: mol_type = other RNA; note = Description of Artificial Sequence: Synthetic oligonucleotide
ttttctcctcttcttcattgc

SEQ ID NO: 26681 - RNA, 21 nt, synthetic construct
  source 1..21: mol_type = other RNA; note = Description of Artificial Sequence: Synthetic oligonucleotide
tttttctcctcttcttcattg

SEQ ID NO: 26682 - RNA, 21 nt, synthetic construct
  source 1..21: mol_type = other RNA; note = Description of Artificial Sequence: Synthetic oligonucleotide
ctttttctcctcttcttcatt

SEQ ID NO: 26683 - RNA, 21 nt, synthetic construct
  source 1..21: mol_type = other RNA; note = Description of Artificial Sequence: Synthetic oligonucleotide
cctttttctcctcttcttcat

SEQ ID NO: 26684 - RNA, 21 nt, synthetic construct
  source 1..21: mol_type = other RNA; note = Description of Artificial Sequence: Synthetic oligonucleotide
tcctttttctcctcttcttca

SEQ ID NO: 26685 - RNA, 21 nt, synthetic construct
  source 1..21: mol_type = other RNA; note = Description of Artificial Sequence: Synthetic oligonucleotide
ttcctttttctcctcttcttc

SEQ ID NO: 26686 - RNA, 21 nt, synthetic construct
  source 1..21: mol_type = other RNA; note = Description of Artificial Sequence: Synthetic oligonucleotide
tttcctttttctcctcttctt

SEQ ID NO: 26687 - RNA, 21 nt, synthetic construct
  source 1..21: mol_type = other RNA; note = Description of Artificial Sequence: Synthetic oligonucleotide
ctttcctttttctcctcttct

SEQ ID NO: 26688 - RNA, 21 nt, synthetic construct
  source 1..21: mol_type = other RNA; note = Description of Artificial Sequence: Synthetic oligonucleotide
actttcctttttctcctcttc

SEQ ID NO: 26689 - RNA, 21 nt, synthetic construct
  source 1..21: mol_type = other RNA; note = Description of Artificial Sequence: Synthetic oligonucleotide
gactttcctttttctcctctt

SEQ ID NO: 26690 - RNA, 21 nt, synthetic construct
  source 1..21: mol_type = other RNA; note = Description of Artificial Sequence: Synthetic oligonucleotide
tgactttcctttttctcctct

SEQ ID NO: 26691 - RNA, 21 nt, synthetic construct
  source 1..21: mol_type = other RNA; note = Description of Artificial Sequence: Synthetic oligonucleotide
gtgactttcctttttctcctc

SEQ ID NO: 26692 - RNA, 21 nt, synthetic construct
  source 1..21: mol_type = other RNA; note = Description of Artificial Sequence: Synthetic oligonucleotide
tgtgactttcctttttctcct

SEQ ID NO: 26693 - RNA, 21 nt, synthetic construct
  source 1..21: mol_type = other RNA; note = Description of Artificial Sequence: Synthetic oligonucleotide
ttgtgactttcctttttctcc

SEQ ID NO: 26694 - RNA, 21 nt, synthetic construct
  source 1..21: mol_type = other RNA; note = Description of Artificial Sequence: Synthetic oligonucleotide
gttgtgactttcctttttctc

SEQ ID NO: 26695 - RNA, 21 nt, synthetic construct
  source 1..21: mol_type = other RNA; note = Description of Artificial Sequence: Synthetic oligonucleotide
ggttgtgactttcctttttct

SEQ ID NO: 26696 - RNA, 21 nt, synthetic construct
  source 1..21: mol_type = other RNA; note = Description of Artificial Sequence: Synthetic oligonucleotide
tggttgtgactttcctttttc

SEQ ID NO: 26697 - RNA, 21 nt, synthetic construct
  source 1..21: mol_type = other RNA; note = Description of Artificial Sequence: Synthetic oligonucleotide
ttggttgtgactttccttttt

SEQ ID NO: 26698 - RNA, 21 nt, synthetic construct
  source 1..21: mol_type = other RNA; note = Description of Artificial Sequence: Synthetic oligonucleotide
attggttgtgactttcctttt

SEQ ID NO: 26699 - RNA, 21 nt, synthetic construct
  source 1..21: mol_type = other RNA; note = Description of Artificial Sequence: Synthetic oligonucleotide
tattggttgtgactttccttt

SEQ ID NO: 26700 - RNA, 21 nt, synthetic construct
  source 1..21: mol_type = other RNA; note = Description of Artificial Sequence: Synthetic oligonucleotide
ttattggttgtgactttcctt

SEQ ID NO: 26701 - RNA, 21 nt, synthetic construct
  source 1..21: mol_type = other RNA; note = Description of Artificial Sequence: Synthetic oligonucleotide
tttattggttgtgactttcct

SEQ ID NO: 26702 - RNA, 21 nt, synthetic construct
  source 1..21: mol_type = other RNA; note = Description of Artificial Sequence: Synthetic oligonucleotide
atttattggttgtgactttcc

SEQ ID NO: 26703 - RNA, 21 nt, synthetic construct
  source 1..21: mol_type = other RNA; note = Description of Artificial Sequence: Synthetic oligonucleotide
catttattggttgtgactttc

SEQ ID NO: 26704 - RNA, 21 nt, synthetic construct
  source 1..21: mol_type = other RNA; note = Description of Artificial Sequence: Synthetic oligonucleotide
acatttattggttgtgacttt

SEQ ID NO: 26705 - RNA, 21 nt, synthetic construct
  source 1..21: mol_type = other RNA; note = Description of Artificial Sequence: Synthetic oligonucleotide
gacatttattggttgtgactt

SEQ ID NO: 26706 - RNA, 21 nt, synthetic construct
  source 1..21: mol_type = other RNA; note = Description of Artificial Sequence: Synthetic oligonucleotide
agacatttattggttgtgact

SEQ ID NO: 26707 - RNA, 21 nt, synthetic construct
  source 1..21: mol_type = other RNA; note = Description of Artificial Sequence: Synthetic oligonucleotide
cagacatttattggttgtgac

SEQ ID NO: 26708 - RNA, 21 nt, synthetic construct
  source 1..21: mol_type = other RNA; note = Description of Artificial Sequence: Synthetic oligonucleotide
ccagacatttattggttgtga

SEQ ID NO: 26709 - RNA, 21 nt, synthetic construct
  source 1..21: mol_type = other RNA; note = Description of Artificial Sequence: Synthetic oligonucleotide
tccagacatttattggttgtg

SEQ ID NO: 26710 - RNA, 21 nt, synthetic construct
  source 1..21: mol_type = other RNA; note = Description of Artificial Sequence: Synthetic oligonucleotide
ttccagacatttattggttgt

SEQ ID NO: 26711 - RNA, 21 nt, synthetic construct
  source 1..21: mol_type = other RNA; note = Description of Artificial Sequence: Synthetic oligonucleotide
gttccagacatttattggttg

SEQ ID NO: 26712 - RNA, 21 nt, synthetic construct
  source 1..21: mol_type = other RNA; note = Description of Artificial Sequence: Synthetic oligonucleotide
tgttccagacatttattggtt

SEQ ID NO: 26713 - RNA, 21 nt, synthetic construct
  source 1..21: mol_type = other RNA; note = Description of Artificial Sequence: Synthetic oligonucleotide
ttgttccagacatttattggt

SEQ ID NO: 26714 - RNA, 21 nt, synthetic construct
  source 1..21: mol_type = other RNA; note = Description of Artificial Sequence: Synthetic oligonucleotide
cttgttccagacatttattgg

SEQ ID NO: 26715 - RNA, 21 nt, synthetic construct
  source 1..21: mol_type = other RNA; note = Description of Artificial Sequence: Synthetic oligonucleotide
acttgttccagacatttattg

SEQ ID NO: 26716 - RNA, 21 nt, synthetic construct
  source 1..21: mol_type = other RNA; note = Description of Artificial Sequence: Synthetic oligonucleotide
cacttgttccagacatttatt

SEQ ID NO: 26717 - RNA, 21 nt, synthetic construct
  source 1..21: mol_type = other RNA; note = Description of Artificial Sequence: Synthetic oligonucleotide
acacttgttccagacatttat

SEQ ID NO: 26718 - RNA, 21 nt, synthetic construct
  source 1..21: mol_type = other RNA; note = Description of Artificial Sequence: Synthetic oligonucleotide
gacacttgttccagacattta

SEQ ID NO: 26719 - RNA, 21 nt, synthetic construct
  source 1..21: mol_type = other RNA; note = Description of Artificial Sequence: Synthetic oligonucleotide
tgacacttgttccagacattt

SEQ ID NO: 26720 - RNA, 21 nt, synthetic construct
  source 1..21: mol_type = other RNA; note = Description of Artificial Sequence: Synthetic oligonucleotide
gtgacacttgttccagacatt

SEQ ID NO: 26721 - RNA, 21 nt, synthetic construct
  source 1..21: mol_type = other RNA; note = Description of Artificial Sequence: Synthetic oligonucleotide
tgtgacacttgttccagacat

SEQ ID NO: 26722 - RNA, 21 nt, synthetic construct
  source 1..21: mol_type = other RNA; note = Description of Artificial Sequence: Synthetic oligonucleotide
ttgtgacacttgttccagaca

SEQ ID NO: 26723 - RNA, 21 nt, synthetic construct
  source 1..21: mol_type = other RNA; note = Description of Artificial Sequence: Synthetic oligonucleotide
attgtgacacttgttccagac

SEQ ID NO: 26724 - RNA, 21 nt, synthetic construct
  source 1..21: mol_type = other RNA; note = Description of Artificial Sequence: Synthetic oligonucleotide
aattgtgacacttgttccaga

SEQ ID NO: 26725 - RNA, 21 nt, synthetic construct
  source 1..21: mol_type = other RNA; note = Description of Artificial Sequence: Synthetic oligonucleotide
taattgtgacacttgttccag

SEQ ID NO: 26726 - RNA, 21 nt, synthetic construct
  source 1..21: mol_type = other RNA; note = Description of Artificial Sequence: Synthetic oligonucleotide
gtaattgtgacacttgttcca

SEQ ID NO: 26727 - RNA, 21 nt, synthetic construct
  source 1..21: mol_type = other RNA; note = Description of Artificial Sequence: Synthetic oligonucleotide
tgtaattgtgacacttgttcc

SEQ ID NO: 26728 - RNA, 21 nt, synthetic construct
  source 1..21: mol_type = other RNA; note = Description of Artificial Sequence: Synthetic oligonucleotide
ttgtaattgtgacacttgttc

SEQ ID NO: 26729 - RNA, 21 nt, synthetic construct
  source 1..21: mol_type = other RNA; note = Description of Artificial Sequence: Synthetic oligonucleotide
cttgtaattgtgacacttgtt

SEQ ID NO: 26730 - RNA, 21 nt, synthetic construct
  source 1..21: mol_type = other RNA; note = Description of Artificial Sequence: Synthetic oligonucleotide
ccttgtaattgtgacacttgt

SEQ ID NO: 26731 - RNA, 21 nt, synthetic construct
  source 1..21: mol_type = other RNA; note = Description of Artificial Sequence: Synthetic oligonucleotide
tccttgtaattgtgacacttg

SEQ ID NO: 26732 - RNA, 21 nt, synthetic construct
  source 1..21: mol_type = other RNA; note = Description of Artificial Sequence: Synthetic oligonucleotide
atccttgtaattgtgacactt

SEQ ID NO: 26733 - RNA, 21 nt, synthetic construct
  source 1..21: mol_type = other RNA; note = Description of Artificial Sequence: Synthetic oligonucleotide
aatccttgtaattgtgacact

SEQ ID NO: 26734 - RNA, 21 nt, synthetic construct
  source 1..21: mol_type = other RNA; note = Description of Artificial Sequence: Synthetic oligonucleotide
caatccttgtaattgtgacac

SEQ ID NO: 26735 - RNA, 21 nt, synthetic construct
  source 1..21: mol_type = other RNA; note = Description of Artificial Sequence: Synthetic oligonucleotide
acaatccttgtaattgtgaca

SEQ ID NO: 26736 - RNA, 21 nt, synthetic construct
  source 1..21: mol_type = other RNA; note = Description of Artificial Sequence: Synthetic oligonucleotide
cacaatccttgtaattgtgac

SEQ ID NO: 26737 - RNA, 21 nt, synthetic construct
  source 1..21: mol_type = other RNA; note = Description of Artificial Sequence: Synthetic oligonucleotide
ccacaatccttgtaattgtga

SEQ ID NO: 26738 - RNA, 21 nt, synthetic construct
  source 1..21: mol_type = other RNA; note = Description of Artificial Sequence: Synthetic oligonucleotide
gccacaatccttgtaattgtg

SEQ ID NO: 26739 - RNA, 21 nt, synthetic construct
  source 1..21: mol_type = other RNA; note = Description of Artificial Sequence: Synthetic oligonucleotide
cgccacaatccttgtaattgt

SEQ ID NO: 26740 - RNA, 21 nt, synthetic construct
  source 1..21: mol_type = other RNA; note = Description of Artificial Sequence: Synthetic oligonucleotide
acgccacaatccttgtaattg

SEQ ID NO: 26741 - RNA, 21 nt, synthetic construct
  source 1..21: mol_type = other RNA; note = Description of Artificial Sequence: Synthetic oligonucleotide
gacgccacaatccttgtaatt

SEQ ID NO: 26742 - RNA, 21 nt, synthetic construct
  source 1..21: mol_type = other RNA; note = Description of Artificial Sequence: Synthetic oligonucleotide
cgacgccacaatccttgtaat

SEQ ID NO: 26743 - RNA, 21 nt, synthetic construct
  source 1..21: mol_type = other RNA; note = Description of Artificial Sequence: Synthetic oligonucleotide
gcgacgccacaatccttgtaa

SEQ ID NO: 26744 - RNA, 21 nt, synthetic construct
  source 1..21: mol_type = other RNA; note = Description of Artificial Sequence: Synthetic oligonucleotide
agcgacgccacaatccttgta

SEQ ID NO: 26745 - RNA, 21 nt, synthetic construct
  source 1..21: mol_type = other RNA; note = Description of Artificial Sequence: Synthetic oligonucleotide
aagcgacgccacaatccttgt

SEQ ID NO: 26746 - RNA, 21 nt, synthetic construct
  source 1..21: mol_type = other RNA; note = Description of Artificial Sequence: Synthetic oligonucleotide
gaagcgacgccacaatccttg

SEQ ID NO: 26747 - RNA, 21 nt, synthetic construct
  source 1..21: mol_type = other RNA; note = Description of Artificial Sequence: Synthetic oligonucleotide
tgaagcgacgccacaatcctt

SEQ ID NO: 26748 - RNA, 21 nt, synthetic construct
  source 1..21: mol_type = other RNA; note = Description of Artificial Sequence: Synthetic oligonucleotide
ttgaagcgacgccacaatcct

SEQ ID NO: 26749 - RNA, 21 nt, synthetic construct
  source 1..21: mol_type = other RNA; note = Description of Artificial Sequence: Synthetic oligonucleotide
attgaagcgacgccacaatcc

SEQ ID NO: 26750 - RNA, 21 nt, synthetic construct
  source 1..21: mol_type = other RNA; note = Description of Artificial Sequence: Synthetic oligonucleotide
gattgaagcgacgccacaatc

SEQ ID NO: 26751 - RNA, 21 nt, synthetic construct
  source 1..21: mol_type = other RNA; note = Description of Artificial Sequence: Synthetic oligonucleotide
cgattgaagcgacgccacaat

SEQ ID NO: 26752 - RNA, 21 nt, synthetic construct
  source 1..21: mol_type = other RNA; note = Description of Artificial Sequence: Synthetic oligonucleotide
tcgattgaagcgacgccacaa

SEQ ID NO: 26753 - RNA, 21 nt, synthetic construct
  source 1..21: mol_type = other RNA; note = Description of Artificial Sequence: Synthetic oligonucleotide
gtcgattgaagcgacgccaca

SEQ ID NO: 26754 - RNA, 21 nt, synthetic construct
  source 1..21: mol_type = other RNA; note = Description of Artificial Sequence: Synthetic oligonucleotide
ggtcgattgaagcgacgccac

SEQ ID NO: 26755 - RNA, 21 nt, synthetic construct
  source 1..21: mol_type = other RNA; note = Description of Artificial Sequence: Synthetic oligonucleotide
aggtcgattgaagcgacgcca

SEQ ID NO: 26756 - RNA, 21 nt, synthetic construct
  source 1..21: mol_type = other RNA; note = Description of Artificial Sequence: Synthetic oligonucleotide
aaggtcgattgaagcgacgcc

SEQ ID NO: 26757 - RNA, 21 nt, synthetic construct
  source 1..21: mol_type = other RNA; note = Description of Artificial Sequence: Synthetic oligonucleotide
aaaggtcgattgaagcgacgc

SEQ ID NO: 26758 - RNA, 21 nt, synthetic construct
  source 1..21: mol_type = other RNA; note = Description of Artificial Sequence: Synthetic oligonucleotide
taaaggtcgattgaagcgacg

SEQ ID NO: 26759 - RNA, 21 nt, synthetic construct
  source 1..21: mol_type = other RNA; note = Description of Artificial Sequence: Synthetic oligonucleotide
gtaaaggtcgattgaagcgac

SEQ ID NO: 26760 - RNA, 21 nt, synthetic construct
  source 1..21: mol_type = other RNA; note = Description of Artificial Sequence: Synthetic oligonucleotide
agtaaaggtcgattgaagcga

SEQ ID NO: 26761 - RNA, 21 nt, synthetic construct
  source 1..21: mol_type = other RNA; note = Description of Artificial Sequence: Synthetic oligonucleotide
cagtaaaggtcgattgaagcg

SEQ ID NO: 26762 - RNA, 21 nt, synthetic construct
  source 1..21: mol_type = other RNA; note = Description of Artificial Sequence: Synthetic oligonucleotide
tcagtaaaggtcgattgaagc

SEQ ID NO: 26763 - RNA, 21 nt, synthetic construct
  source 1..21: mol_type = other RNA; note = Description of Artificial Sequence: Synthetic oligonucleotide
ttcagtaaaggtcgattgaag

SEQ ID NO: 26764 - RNA, 21 nt, synthetic construct
  source 1..21: mol_type = other RNA; note = Description of Artificial Sequence: Synthetic oligonucleotide
tttcagtaaaggtcgattgaa

SEQ ID NO: 26765 - RNA, 21 nt, synthetic construct
  source 1..21: mol_type = other RNA; note = Description of Artificial Sequence: Synthetic oligonucleotide
gtttcagtaaaggtcgattga

SEQ ID NO: 26766 - RNA, 21 nt, synthetic construct
  source 1..21: mol_type = other RNA; note = Description of Artificial Sequence: Synthetic oligonucleotide
tgtttcagtaaaggtcgattg

SEQ ID NO: 26767 - RNA, 21 nt, synthetic construct
  source 1..21: mol_type = other RNA; note = Description of Artificial Sequence: Synthetic oligonucleotide
ttgtttcagtaaaggtcgatt

SEQ ID NO: 26768 - RNA, 21 nt, synthetic construct
  source 1..21: mol_type = other RNA; note = Description of Artificial Sequence: Synthetic oligonucleotide
gttgtttcagtaaaggtcgat

SEQ ID NO: 26769 - RNA, 21 nt, synthetic construct
  source 1..21: mol_type = other RNA; note = Description of Artificial Sequence: Synthetic oligonucleotide
tgttgtttcagtaaaggtcga

SEQ ID NO: 26770 - RNA, 21 nt, synthetic construct
  source 1..21: mol_type = other RNA; note = Description of Artificial Sequence: Synthetic oligonucleotide
ctgttgtttcagtaaaggtcg

SEQ ID NO: 26771 - RNA, 21 nt, synthetic construct
  source 1..21: mol_type = other RNA; note = Description of Artificial Sequence: Synthetic oligonucleotide
actgttgtttcagtaaaggtc

SEQ ID NO: 26772 - RNA, 21 nt, synthetic construct
  source 1..21: mol_type = other RNA; note = Description of Artificial Sequence: Synthetic oligonucleotide
tactgttgtttcagtaaaggt

SEQ ID NO: 26773 - RNA, 21 nt, synthetic construct
  source 1..21: mol_type = other RNA; note = Description of Artificial Sequence: Synthetic oligonucleotide
ttactgttgtttcagtaaagg

SEQ ID NO: 26774 - RNA, 21 nt, synthetic construct
  source 1..21: mol_type = other RNA; note = Description of Artificial Sequence: Synthetic oligonucleotide
tttactgttgtttcagtaaag

SEQ ID NO: 26775 - RNA, 21 nt, synthetic construct
  source 1..21: mol_type = other RNA; note = Description of Artificial Sequence: Synthetic oligonucleotide
gtttactgttgtttcagtaaa

SEQ ID NO: 26776 - RNA, 21 nt, synthetic construct
  source 1..21: mol_type = other RNA; note = Description of Artificial Sequence: Synthetic oligonucleotide
ggtttactgttgtttcagtaa

SEQ ID NO: 26777 - RNA, 21 nt, synthetic construct
  source 1..21: mol_type = other RNA; note = Description of Artificial Sequence: Synthetic oligonucleotide
tggtttactgttgtttcagta

SEQ ID NO: 26778 - RNA, 21 nt, synthetic construct
  source 1..21: mol_type = other RNA; note = Description of Artificial Sequence: Synthetic oligonucleotide
atggtttactgttgtttcagt

SEQ ID NO: 26779 - RNA, 21 nt, synthetic construct
  source 1..21: mol_type = other RNA; note = Description of Artificial Sequence: Synthetic oligonucleotide
gatggtttactgttgtttcag

SEQ ID NO: 26780 - RNA, 21 nt, synthetic construct
  source 1..21: mol_type = other RNA; note = Description of Artificial Sequence: Synthetic oligonucleotide
agatggtttactgttgtttca

SEQ ID NO: 26781 - RNA, 21 nt, synthetic construct
  source 1..21: mol_type = other RNA; note = Description of Artificial Sequence: Synthetic oligonucleotide
aagatggtttactgttgtttc

SEQ ID NO: 26782 - RNA, 21 nt, synthetic construct
  source 1..21: mol_type = other RNA; note = Description of Artificial Sequence: Synthetic oligonucleotide
aaagatggtttactgttgttt

SEQ ID NO: 26783 - RNA, 21 nt, synthetic construct
  source 1..21: mol_type = other RNA; note = Description of Artificial Sequence: Synthetic oligonucleotide
taaagatggtttactgttgtt

SEQ ID NO: 26784 - RNA, 21 nt, synthetic construct
  source 1..21: mol_type = other RNA; note = Description of Artificial Sequence: Synthetic oligonucleotide
ataaagatggtttactgttgt

SEQ ID NO: 26785 - RNA, 21 nt, synthetic construct
  source 1..21: mol_type = other RNA; note = Description of Artificial Sequence: Synthetic oligonucleotide
aataaagatggtttactgttg

SEQ ID NO: 26786 - RNA, 21 nt, synthetic construct
  source 1..21: mol_type = other RNA; note = Description of Artificial Sequence: Synthetic oligonucleotide
taataaagatggtttactgtt

SEQ ID NO: 26787 - RNA, 21 nt, synthetic construct
  source 1..21: mol_type = other RNA; note = Description of Artificial Sequence: Synthetic oligonucleotide
ataataaagatggtttactgt

SEQ ID NO: 26788 - RNA, 21 nt, synthetic construct
  source 1..21: mol_type = other RNA; note = Description of Artificial Sequence: Synthetic oligonucleotide
cataataaagatggtttactg

SEQ ID NO: 26789 - RNA, 21 nt, synthetic construct
  source 1..21: mol_type = other RNA; note = Description of Artificial Sequence: Synthetic oligonucleotide
ccataataaagatggtttact

SEQ ID NO: 26790 - RNA, 21 nt, synthetic construct
  source 1..21: mol_type = other RNA; note = Description of Artificial Sequence: Synthetic oligonucleotide
accataataaagatggtttac

SEQ ID NO: 26791 - RNA, 21 nt, synthetic construct
  source 1..21: mol_type = other RNA; note = Description of Artificial Sequence: Synthetic oligonucleotide
gaccataataaagatggttta

SEQ ID NO: 26792 - RNA, 21 nt, synthetic construct
  source 1..21: mol_type = other RNA; note = Description of Artificial Sequence: Synthetic oligonucleotide
tgaccataataaagatggttt

SEQ ID NO: 26793 - RNA, 21 nt, synthetic construct
  source 1..21: mol_type = other RNA; note = Description of Artificial Sequence: Synthetic oligonucleotide
atgaccataataaagatggtt

SEQ ID NO: 26794 - RNA, 21 nt, synthetic construct
  source 1..21: mol_type = other RNA; note = Description of Artificial Sequence: Synthetic oligonucleotide
tatgaccataataaagatggt

SEQ ID NO: 26795 - RNA, 21 nt, synthetic construct
  source 1..21: mol_type = other RNA; note = Description of Artificial Sequence: Synthetic oligonucleotide
atatgaccataataaagatgg

SEQ ID NO: 26796 - RNA, 21 nt, synthetic construct
  source 1..21: mol_type = other RNA; note = Description of Artificial Sequence: Synthetic oligonucleotide
aatatgaccataataaagatg

SEQ ID NO: 26797 - RNA, 21 nt, synthetic construct
  source 1..21: mol_type = other RNA; note = Description of Artificial Sequence: Synthetic oligonucleotide
aaatatgaccataataaagat

SEQ ID NO: 26798 - RNA, 21 nt, synthetic construct
  source 1..21: mol_type = other RNA; note = Description of Artificial Sequence: Synthetic oligonucleotide
gaaatatgaccataataaaga

SEQ ID NO: 26799 - RNA, 21 nt, synthetic construct
  source 1..21: mol_type = other RNA; note = Description of Artificial Sequence: Synthetic oligonucleotide
tgaaatatgaccataataaag

SEQ ID NO: 26800 - RNA, 21 nt, synthetic construct
  source 1..21: mol_type = other RNA; note = Description of Artificial Sequence: Synthetic oligonucleotide
gtgaaatatgaccataataaa

SEQ ID NO: 26801 - RNA, 21 nt, synthetic construct
  source 1..21: mol_type = other RNA; note = Description of Artificial Sequence: Synthetic oligonucleotide
tgtgaaatatgaccataataa

SEQ ID NO: 26802 - RNA, 21 nt, synthetic construct
  source 1..21: mol_type = other RNA; note = Description of Artificial Sequence: Synthetic oligonucleotide
ctgtgaaatatgaccataata

SEQ ID NO: 26803 - RNA, 21 nt, synthetic construct
  source 1..21: mol_type = other RNA; note = Description of Artificial Sequence: Synthetic oligonucleotide
gctgtgaaatatgaccataat

SEQ ID NO: 26804 - RNA, 21 nt, synthetic construct
  source 1..21: mol_type = other RNA; note = Description of Artificial Sequence: Synthetic oligonucleotide
tgctgtgaaatatgaccataa

SEQ ID NO: 26805 - RNA, 21 nt, synthetic construct
  source 1..21: mol_type = other RNA; note = Description of Artificial Sequence: Synthetic oligonucleotide
gtgctgtgaaatatgaccata

SEQ ID NO: 26806 - RNA, 21 nt, synthetic construct
  source 1..21: mol_type = other RNA; note = Description of Artificial Sequence: Synthetic oligonucleotide
ggtgctgtgaaatatgaccat

SEQ ID NO: 26807 - RNA, 21 nt, synthetic construct
  source 1..21: mol_type = other RNA; note = Description of Artificial Sequence: Synthetic oligonucleotide
tggtgctgtgaaatatgacca

SEQ ID NO: 26808 - RNA, 21 nt, synthetic construct
  source 1..21: mol_type = other RNA; note = Description of Artificial Sequence: Synthetic oligonucleotide
ttggtgctgtgaaatatgacc

SEQ ID NO: 26809 - RNA, 21 nt, synthetic construct
  source 1..21: mol_type = other RNA; note = Description of Artificial Sequence: Synthetic oligonucleotide
tttggtgctgtgaaatatgac

SEQ ID NO: 26810 - RNA, 21 nt, synthetic construct
  source 1..21: mol_type = other RNA; note = Description of Artificial Sequence: Synthetic oligonucleotide
ttttggtgctgtgaaatatga

SEQ ID NO: 26811 - RNA, 21 nt, synthetic construct
  source 1..21: mol_type = other RNA; note = Description of Artificial Sequence: Synthetic oligonucleotide
attttggtgctgtgaaatatg

SEQ ID NO: 26812 - RNA, 21 nt, synthetic construct
  source 1..21: mol_type = other RNA; note = Description of Artificial Sequence: Synthetic oligonucleotide
tattttggtgctgtgaaatat

SEQ ID NO: 26813 - RNA, 21 nt, synthetic construct
  source 1..21: mol_type = other RNA; note = Description of Artificial Sequence: Synthetic oligonucleotide
ttattttggtgctgtgaaata

SEQ ID NO: 26814 - RNA, 21 nt, synthetic construct
  source 1..21: mol_type = other RNA; note = Description of Artificial Sequence: Synthetic oligonucleotide
tttattttggtgctgtgaaat

SEQ ID NO: 26815 - RNA, 21 nt, synthetic construct
  source 1..21: mol_type = other RNA; note = Description of Artificial Sequence: Synthetic oligonucleotide
atttattttggtgctgtgaaa

SEQ ID NO: 26816 - RNA, 21 nt, synthetic construct
  source 1..21: mol_type = other RNA; note = Description of Artificial Sequence: Synthetic oligonucleotide
gatttattttggtgctgtgaa

SEQ ID NO: 26817 - RNA, 21 nt, synthetic construct
  source 1..21: mol_type = other RNA; note = Description of Artificial Sequence: Synthetic oligonucleotide
tgatttattttggtgctgtga

SEQ ID NO: 26818 - RNA, 21 nt, synthetic construct
  source 1..21: mol_type = other RNA; note = Description of Artificial Sequence: Synthetic oligonucleotide
atgatttattttggtgctgtg

SEQ ID NO: 26819 - RNA, 21 nt, synthetic construct
  source 1..21: mol_type = other RNA; note = Description of Artificial Sequence: Synthetic oligonucleotide
gatgatttattttggtgctgt

SEQ ID NO: 26820 - RNA, 21 nt, synthetic construct
  source 1..21: mol_type = other RNA; note = Description of Artificial Sequence: Synthetic oligonucleotide
agatgatttattttggtgctg

SEQ ID NO: 26821 - RNA, 21 nt, synthetic construct
  source 1..21: mol_type = other RNA; note = Description of Artificial Sequence: Synthetic oligonucleotide
aagatgatttattttggtgct

SEQ ID NO: 26822 - RNA, 21 nt, synthetic construct
  source 1..21: mol_type = other RNA; note = Description of Artificial Sequence: Synthetic oligonucleotide
aaagatgatttattttggtgc

SEQ ID NO: 26823 - RNA, 21 nt, synthetic construct
  source 1..21: mol_type = other RNA; note = Description of Artificial Sequence: Synthetic oligonucleotide
taaagatgatttattttggtg

SEQ ID NO: 26824 - RNA, 21 nt, synthetic construct
  source 1..21: mol_type = other RNA; note = Description of Artificial Sequence: Synthetic oligonucleotide
ataaagatgatttattttggt

SEQ ID NO: 26825 - RNA, 21 nt, synthetic construct
  source 1..21: mol_type = other RNA; note = Description of Artificial Sequence: Synthetic oligonucleotide
aataaagatgatttattttgg

SEQ ID NO: 26826 - RNA, 21 nt, synthetic construct
  source 1..21: mol_type = other RNA; note = Description of Artificial Sequence: Synthetic oligonucleotide
taataaagatgatttattttg

SEQ ID NO: 26827 - RNA, 21 nt, synthetic construct
  source 1..21: mol_type = other RNA; note = Description of Artificial Sequence: Synthetic oligonucleotide
ttaataaagatgatttatttt

SEQ ID NO: 26828 - RNA, 21 nt, synthetic construct
  source 1..21: mol_type = other RNA; note = Description of Artificial Sequence: Synthetic oligonucleotide
cttaataaagatgatttattt

SEQ ID NO: 26829 - RNA, 21 nt, synthetic construct
  source 1..21: mol_type = other RNA; note = Description of Artificial Sequence: Synthetic oligonucleotide
acttaataaagatgatttatt

SEQ ID NO: 26830 - RNA, 21 nt, synthetic construct
  source 1..21: mol_type = other RNA; note = Description of Artificial Sequence: Synthetic oligonucleotide
tacttaataaagatgatttat

SEQ ID NO: 26831 - RNA, 21 nt, synthetic construct
  source 1..21: mol_type = other RNA; note = Description of Artificial Sequence: Synthetic oligonucleotide
ctacttaataaagatgattta

SEQ ID NO: 26832 - RNA, 21 nt, synthetic construct
  source 1..21: mol_type = other RNA; note = Description of Artificial Sequence: Synthetic oligonucleotide
tctacttaataaagatgattt

SEQ ID NO: 26833 - RNA, 21 nt, synthetic construct
  source 1..21: mol_type = other RNA; note = Description of Artificial Sequence: Synthetic oligonucleotide
atctacttaataaagatgatt

SEQ ID NO: 26834 - RNA, 21 nt, synthetic construct
  source 1..21: mol_type = other RNA; note = Description of Artificial Sequence: Synthetic oligonucleotide
catctacttaataaagatgat

SEQ ID NO: 26835 - RNA, 21 nt, synthetic construct
  source 1..21: mol_type = other RNA; note = Description of Artificial Sequence: Synthetic oligonucleotide
tcatctacttaataaagatga

SEQ ID NO: 26836 - RNA, 21 nt, synthetic construct
  source 1..21: mol_type = other RNA; note = Description of Artificial Sequence: Synthetic oligonucleotide
ttcatctacttaataaagatg

SEQ ID NO: 26837 - RNA, 21 nt, synthetic construct
  source 1..21: mol_type = other RNA; note = Description of Artificial Sequence: Synthetic oligonucleotide
tttcatctacttaataaagat

SEQ ID NO: 26838 - RNA, 21 nt, synthetic construct
  source 1..21: mol_type = other RNA; note = Description of Artificial Sequence: Synthetic oligonucleotide
gtttcatctacttaataaaga

SEQ ID NO: 26839 - RNA, 21 nt, synthetic construct
  source 1..21: mol_type = other RNA; note = Description of Artificial Sequence: Synthetic oligonucleotide
tgtttcatctacttaataaag

SEQ ID NO: 26840 - RNA, 21 nt, synthetic construct
  source 1..21: mol_type = other RNA; note = Description of Artificial Sequence: Synthetic oligonucleotide
atgtttcatctacttaataaa

SEQ ID NO: 26841 - RNA, 21 nt, synthetic construct
  source 1..21: mol_type = other RNA; note = Description of Artificial Sequence: Synthetic oligonucleotide
aatgtttcatctacttaataa

SEQ ID NO: 26842 - RNA, 21 nt, synthetic construct
  source 1..21: mol_type = other RNA; note = Description of Artificial Sequence: Synthetic oligonucleotide
taatgtttcatctacttaata

SEQ ID NO: 26843 - RNA, 21 nt, synthetic construct
  source 1..21: mol_type = other RNA; note = Description of Artificial Sequence: Synthetic oligonucleotide
ttaatgtttcatctacttaat

SEQ ID NO: 26844 - RNA, 21 nt, synthetic construct
  source 1..21: mol_type = other RNA; note = Description of Artificial Sequence: Synthetic oligonucleotide
gttaatgtttcatctacttaa

SEQ ID NO: 26845 - RNA, 21 nt, synthetic construct
  source 1..21: mol_type = other RNA; note = Description of Artificial Sequence: Synthetic oligonucleotide
agttaatgtttcatctactta

SEQ ID NO: 26846 - RNA, 21 nt, synthetic construct
  source 1..21: mol_type = other RNA; note = Description of Artificial Sequence: Synthetic oligonucleotide
gagttaatgtttcatctactt

SEQ ID NO: 26847 - RNA, 21 nt, synthetic construct
  source 1..21: mol_type = other RNA; note = Description of Artificial Sequence: Synthetic oligonucleotide
agagttaatgtttcatctact

SEQ ID NO: 26848 - RNA, 21 nt, synthetic construct
  source 1..21: mol_type = other RNA; note = Description of Artificial Sequence: Synthetic oligonucleotide
tagagttaatgtttcatctac

SEQ ID NO: 26849 - RNA, 21 nt, synthetic construct
  source 1..21: mol_type = other RNA; note = Description of Artificial Sequence: Synthetic oligonucleotide
ttagagttaatgtttcatcta

SEQ ID NO: 26850 - RNA, 21 nt, synthetic construct
  source 1..21: mol_type = other RNA; note = Description of Artificial Sequence: Synthetic oligonucleotide
gttagagttaatgtttcatct

SEQ ID NO: 26851 - RNA, 21 nt, synthetic construct
  source 1..21: mol_type = other RNA; note = Description of Artificial Sequence: Synthetic oligonucleotide
agttagagttaatgtttcatc

SEQ ID NO: 26852 - RNA, 21 nt, synthetic construct
  source 1..21: mol_type = other RNA; note = Description of Artificial Sequence: Synthetic oligonucleotide
cagttagagttaatgtttcat

SEQ ID NO: 26853 - RNA, 21 nt, synthetic construct
  source 1..21: mol_type = other RNA; note = Description of Artificial Sequence: Synthetic oligonucleotide
acagttagagttaatgtttca

SEQ ID NO: 26854 - RNA, 21 nt, synthetic construct
  source 1..21: mol_type = other RNA; note = Description of Artificial Sequence: Synthetic oligonucleotide
cacagttagagttaatgtttc

SEQ ID NO: 26855 - RNA, 21 nt, synthetic construct
  source 1..21: mol_type = other RNA; note = Description of Artificial Sequence: Synthetic oligonucleotide
tcacagttagagttaatgttt

SEQ ID NO: 26856 - RNA, 21 nt, synthetic construct
  source 1..21: mol_type = other RNA; note = Description of Artificial Sequence: Synthetic oligonucleotide
gtcacagttagagttaatgtt

SEQ ID NO: 26857 - RNA, 21 nt, synthetic construct
  source 1..21: mol_type = other RNA; note = Description of Artificial Sequence: Synthetic oligonucleotide
tgtcacagttagagttaatgt

SEQ ID NO: 26858 - RNA, 21 nt, synthetic construct
  source 1..21: mol_type = other RNA; note = Description of Artificial Sequence: Synthetic oligonucleotide
ttgtcacagttagagttaatg

SEQ ID NO: 26859 - RNA, 21 nt, synthetic construct
  source 1..21: mol_type = other RNA; note = Description of Artificial Sequence: Synthetic oligonucleotide
tttgtcacagttagagttaat

SEQ ID NO: 26860 - RNA, 21 nt, synthetic construct
  source 1..21: mol_type = other RNA; note = Description of Artificial Sequence: Synthetic oligonucleotide
ctttgtcacagttagagttaa

SEQ ID NO: 26861 - RNA, 21 nt, synthetic construct
  source 1..21: mol_type = other RNA; note = Description of Artificial Sequence: Synthetic oligonucleotide
tctttgtcacagttagagtta

SEQ ID NO: 26862 - RNA, 21 nt, synthetic construct
  source 1..21: mol_type = other RNA; note = Description of Artificial Sequence: Synthetic oligonucleotide
ttctttgtcacagttagagtt

SEQ ID NO: 26863 - RNA, 21 nt, synthetic construct
  source 1..21: mol_type = other RNA; note = Description of Artificial Sequence: Synthetic oligonucleotide
cttctttgtcacagttagagt

SEQ ID NO: 26864 - RNA, 21 nt, synthetic construct
  source 1..21: mol_type = other RNA; note = Description of Artificial Sequence: Synthetic oligonucleotide
tcttctttgtcacagttagag

SEQ ID NO: 26865 - RNA, 21 nt, synthetic construct
  source 1..21: mol_type = other RNA; note = Description of Artificial Sequence: Synthetic oligonucleotide
gtcttctttgtcacagttaga

SEQ ID NO: 26866 - RNA, 21 nt, synthetic construct
  source 1..21: mol_type = other RNA; note = Description of Artificial Sequence: Synthetic oligonucleotide
ggtcttctttgtcacagttag

SEQ ID NO: 26867 - RNA, 21 nt, synthetic construct
  source 1..21: mol_type = other RNA; note = Description of Artificial Sequence: Synthetic oligonucleotide
tggtcttctttgtcacagtta

SEQ ID NO: 26868 - RNA, 21 nt, synthetic construct
  source 1..21: mol_type = other RNA; note = Description of Artificial Sequence: Synthetic oligonucleotide
gtggtcttctttgtcacagtt

SEQ ID NO: 26869 - RNA, 21 nt, synthetic construct
  source 1..21: mol_type = other RNA; note = Description of Artificial Sequence: Synthetic oligonucleotide
tgtggtcttctttgtcacagt

SEQ ID NO: 26870 - RNA, 21 nt, synthetic construct
  source 1..21: mol_type = other RNA; note = Description of Artificial Sequence: Synthetic oligonucleotide
ttgtggtcttctttgtcacag

SEQ ID NO: 26871 - RNA, 21 nt, synthetic construct
  source 1..21: mol_type = other RNA; note = Description of Artificial Sequence: Synthetic oligonucleotide
tttgtggtcttctttgtcaca

SEQ ID NO: 26872 - RNA, 21 nt, synthetic construct
  source 1..21: mol_type = other RNA; note = Description of Artificial Sequence: Synthetic oligonucleotide
atttgtggtcttctttgtcac

SEQ ID NO: 26873 - RNA, 21 nt, synthetic construct
  source 1..21: mol_type = other RNA; note = Description of Artificial Sequence: Synthetic oligonucleotide
tatttgtggtcttctttgtca

SEQ ID NO: 26874 - RNA, 21 nt, synthetic construct
  source 1..21: mol_type = other RNA; note = Description of Artificial Sequence: Synthetic oligonucleotide
ctatttgtggtcttctttgtc

SEQ ID NO: 26875 - RNA, 21 nt, synthetic construct
  source 1..21: mol_type = other RNA; note = Description of Artificial Sequence: Synthetic oligonucleotide
actatttgtggtcttctttgt

SEQ ID NO: 26876 - RNA, 21 nt, synthetic construct
  source 1..21: mol_type = other RNA; note = Description of Artificial Sequence: Synthetic oligonucleotide
aactatttgtggtcttctttg

SEQ ID NO: 26877 - RNA, 21 nt, synthetic construct
  source 1..21: mol_type = other RNA; note = Description of Artificial Sequence: Synthetic oligonucleotide
taactatttgtggtcttcttt

SEQ ID NO: 26878 - RNA, 21 nt, synthetic construct
  source 1..21: mol_type = other RNA; note = Description of Artificial Sequence: Synthetic oligonucleotide
ataactatttgtggtcttctt

SEQ ID NO: 26879 - RNA, 21 nt, synthetic construct
  source 1..21: mol_type = other RNA; note = Description of Artificial Sequence: Synthetic oligonucleotide
gataactatttgtggtcttct

SEQ ID NO: 26880 - RNA, 21 nt, synthetic construct
  source 1..21: mol_type = other RNA; note = Description of Artificial Sequence: Synthetic oligonucleotide
agataactatttgtggtcttc

SEQ ID NO: 26881 - RNA, 21 nt, synthetic construct
  source 1..21: mol_type = other RNA; note = Description of Artificial Sequence: Synthetic oligonucleotide
aagataactatttgtggtctt

SEQ ID NO: 26882 - RNA, 21 nt, synthetic construct
  source 1..21: mol_type = other RNA; note = Description of Artificial Sequence: Synthetic oligonucleotide
aaagataactatttgtggtct

SEQ ID NO: 26883 - RNA, 21 nt, synthetic construct
  source 1..21: mol_type = other RNA; note = Description of Artificial Sequence: Synthetic oligonucleotide
aaaagataactatttgtggtc

SEQ ID NO: 26884 - RNA, 21 nt, synthetic construct
  source 1..21: mol_type = other RNA; note = Description of Artificial Sequence: Synthetic oligonucleotide
taaaagataactatttgtggt

SEQ ID NO: 26885 - RNA, 21 nt, synthetic construct
  source 1..21: mol_type = other RNA; note = Description of Artificial Sequence: Synthetic oligonucleotide
ttaaaagataactatttgtgg

SEQ ID NO: 26886 - RNA, 21 nt, synthetic construct
  source 1..21: mol_type = other RNA; note = Description of Artificial Sequence: Synthetic oligonucleotide
attaaaagataactatttgtg

SEQ ID NO: 26887 - RNA, 21 nt, synthetic construct
  source 1..21: mol_type = other RNA; note = Description of Artificial Sequence: Synthetic oligonucleotide
aattaaaagataactatttgt

SEQ ID NO: 26888 - RNA, 21 nt, synthetic construct
  source 1..21: mol_type = other RNA; note = Description of Artificial Sequence: Synthetic oligonucleotide
taattaaaagataactatttg

SEQ ID NO: 26889 - RNA, 21 nt, synthetic construct
  source 1..21: mol_type = other RNA; note = Description of Artificial Sequence: Synthetic oligonucleotide
gtaattaaaagataactattt

SEQ ID NO: 26890 - RNA, 21 nt, synthetic construct
  source 1..21: mol_type = other RNA; note = Description of Artificial Sequence: Synthetic oligonucleotide
tgtaattaaaagataactatt

SEQ ID NO: 26891 - RNA, 21 nt, synthetic construct
  source 1..21: mol_type = other RNA; note = Description of Artificial Sequence: Synthetic oligonucleotide
ctgtaattaaaagataactat

SEQ ID NO: 26892 - RNA, 21 nt, synthetic construct
  source 1..21: mol_type = other RNA; note = Description of Artificial Sequence: Synthetic oligonucleotide
tctgtaattaaaagataacta

SEQ ID NO: 26893 - RNA, 21 nt, synthetic construct
  source 1..21: mol_type = other RNA; note = Description of Artificial Sequence: Synthetic oligonucleotide
ttctgtaattaaaagataact

SEQ ID NO: 26894 - RNA, 21 nt, synthetic construct
  source 1..21: mol_type = other RNA; note = Description of Artificial Sequence: Synthetic oligonucleotide
cttctgtaattaaaagataac

SEQ ID NO: 26895 - RNA, 21 nt, synthetic construct
  source 1..21: mol_type = other RNA; note = Description of Artificial Sequence: Synthetic oligonucleotide
tcttctgtaattaaaagataa

SEQ ID NO: 26896 - RNA, 21 nt, synthetic construct
  source 1..21: mol_type = other RNA; note = Description of Artificial Sequence: Synthetic oligonucleotide
ctcttctgtaattaaaagata

SEQ ID NO: 26897 - RNA, 21 nt, synthetic construct
  source 1..21: mol_type = other RNA; note = Description of Artificial Sequence: Synthetic oligonucleotide
actcttctgtaattaaaagat

SEQ ID NO: 26898 - RNA, 21 nt, synthetic construct
  source 1..21: mol_type = other RNA; note = Description of Artificial Sequence: Synthetic oligonucleotide
aactcttctgtaattaaaaga

SEQ ID NO: 26899 - RNA, 21 nt, synthetic construct
  source 1..21: mol_type = other RNA; note = Description of Artificial Sequence: Synthetic oligonucleotide
aaactcttctgtaattaaaag

SEQ ID NO: 26900 - RNA, 21 nt, synthetic construct
  source 1..21: mol_type = other RNA; note = Description of Artificial Sequence: Synthetic oligonucleotide
gaaactcttctgtaattaaaa

SEQ ID NO: 26901 - RNA, 21 nt, synthetic construct
  source 1..21: mol_type = other RNA; note = Description of Artificial Sequence: Synthetic oligonucleotide
agaaactcttctgtaattaaa

SEQ ID NO: 26902 - RNA, 21 nt, synthetic construct
  source 1..21: mol_type = other RNA; note = Description of Artificial Sequence: Synthetic oligonucleotide
aagaaactcttctgtaattaa

SEQ ID NO: 26903 - RNA, 21 nt, synthetic construct
  source 1..21: mol_type = other RNA; note = Description of Artificial Sequence: Synthetic oligonucleotide
taagaaactcttctgtaatta

SEQ ID NO: 26904 - RNA, 21 nt, synthetic construct
  source 1..21: mol_type = other RNA; note = Description of Artificial Sequence: Synthetic oligonucleotide
ttaagaaactcttctgtaatt

SEQ ID NO: 26905 - RNA, 21 nt, synthetic construct
  source 1..21: mol_type = other RNA; note = Description of Artificial Sequence: Synthetic oligonucleotide
gttaagaaactcttctgtaat

SEQ ID NO: 26906 - RNA, 21 nt, synthetic construct
  source 1..21: mol_type = other RNA; note = Description of Artificial Sequence: Synthetic oligonucleotide
agttaagaaactcttctgtaa

SEQ ID NO: 26907 - RNA, 21 nt, synthetic construct
  source 1..21: mol_type = other RNA; note = Description of Artificial Sequence: Synthetic oligonucleotide
aagttaagaaactcttctgta

SEQ ID NO: 26908 - RNA, 21 nt, synthetic construct
  source 1..21: mol_type = other RNA; note = Description of Artificial Sequence: Synthetic oligonucleotide
taagttaagaaactcttctgt

SEQ ID NO: 26909 - RNA, 21 nt, synthetic construct
  source 1..21: mol_type = other RNA; note = Description of Artificial Sequence: Synthetic oligonucleotide
gtaagttaagaaactcttctg

SEQ ID NO: 26910 - RNA, 21 nt, synthetic construct
  source 1..21: mol_type = other RNA; note = Description of Artificial Sequence: Synthetic oligonucleotide
agtaagttaagaaactcttct

SEQ ID NO: 26911 - RNA, 21 nt, synthetic construct
  source 1..21: mol_type = other RNA; note = Description of Artificial Sequence: Synthetic oligonucleotide
aagtaagttaagaaactcttc

SEQ ID NO: 26912 - RNA, 21 nt, synthetic construct
  source 1..21: mol_type = other RNA; note = Description of Artificial Sequence: Synthetic oligonucleotide
aaagtaagttaagaaactctt

SEQ ID NO: 26913 - RNA, 21 nt, synthetic construct
  source 1..21: mol_type = other RNA; note = Description of Artificial Sequence: Synthetic oligonucleotide
aaaagtaagttaagaaactct

SEQ ID NO: 26914 - RNA, 21 nt, synthetic construct
  source 1..21: mol_type = other RNA; note = Description of Artificial Sequence: Synthetic oligonucleotide
caaaagtaagttaagaaactc

SEQ ID NO: 26915 - RNA, 21 nt, synthetic construct
  source 1..21: mol_type = other RNA; note = Description of Artificial Sequence: Synthetic oligonucleotide
acaaaagtaagttaagaaact

SEQ ID NO: 26916 - RNA, 21 nt, synthetic construct
  source 1..21: mol_type = other RNA; note = Description of Artificial Sequence: Synthetic oligonucleotide
tacaaaagtaagttaagaaac

SEQ ID NO: 26917 - RNA, 21 nt, synthetic construct
  source 1..21: mol_type = other RNA; note = Description of Artificial Sequence: Synthetic oligonucleotide
ttacaaaagtaagttaagaaa

SEQ ID NO: 26918 - RNA, 21 nt, synthetic construct
  source 1..21: mol_type = other RNA; note = Description of Artificial Sequence: Synthetic oligonucleotide
cttacaaaagtaagttaagaa

SEQ ID NO: 26919 - RNA, 21 nt, synthetic construct
  source 1..21: mol_type = other RNA; note = Description of Artificial Sequence: Synthetic oligonucleotide
acttacaaaagtaagttaaga

SEQ ID NO: 26920 - RNA, 21 nt, synthetic construct
  source 1..21: mol_type = other RNA; note = Description of Artificial Sequence: Synthetic oligonucleotide
aacttacaaaagtaagttaag

SEQ ID NO: 26921 - RNA, 21 nt, synthetic construct
  source 1..21: mol_type = other RNA; note = Description of Artificial Sequence: Synthetic oligonucleotide
aaacttacaaaagtaagttaa

SEQ ID NO: 26922 - RNA, 21 nt, synthetic construct
  source 1..21: mol_type = other RNA; note = Description of Artificial Sequence: Synthetic oligonucleotide
aaaacttacaaaagtaagtta

SEQ ID NO: 26923 - RNA, 21 nt, synthetic construct
  source 1..21: mol_type = other RNA; note = Description of Artificial Sequence: Synthetic oligonucleotide
aaaaacttacaaaagtaagtt

SEQ ID NO: 26924 - RNA, 21 nt, synthetic construct
  source 1..21: mol_type = other RNA; note = Description of Artificial Sequence: Synthetic oligonucleotide
taaaaacttacaaaagtaagt

SEQ ID NO: 26925 - RNA, 21 nt, synthetic construct
  source 1..21: mol_type = other RNA; note = Description of Artificial Sequence: Synthetic oligonucleotide
ataaaaacttacaaaagtaag

SEQ ID NO: 26926 - RNA, 21 nt, synthetic construct
  source 1..21: mol_type = other RNA; note = Description of Artificial Sequence: Synthetic oligonucleotide
aataaaaacttacaaaagtaa

SEQ ID NO: 26927 - RNA, 21 nt, synthetic construct
  source 1..21: mol_type = other RNA; note = Description of Artificial Sequence: Synthetic oligonucleotide
caataaaaacttacaaaagta

SEQ ID NO: 26928 - RNA, 21 nt, synthetic construct
  source 1..21: mol_type = other RNA; note = Description of Artificial Sequence: Synthetic oligonucleotide
acaataaaaacttacaaaagt

SEQ ID NO: 26929 - RNA, 21 nt, synthetic construct
  source 1..21: mol_type = other RNA; note = Description of Artificial Sequence: Synthetic oligonucleotide
cacaataaaaacttacaaaag

SEQ ID NO: 26930 - RNA, 21 nt, synthetic construct
  source 1..21: mol_type = other RNA; note = Description of Artificial Sequence: Synthetic oligonucleotide
acacaataaaaacttacaaaa

SEQ ID NO: 26931 - RNA, 21 nt, synthetic construct
  source 1..21: mol_type = other RNA; note = Description of Artificial Sequence: Synthetic oligonucleotide
tacacaataaaaacttacaaa

SEQ ID NO: 26932 - RNA, 21 nt, synthetic construct
  source 1..21: mol_type = other RNA; note = Description of Artificial Sequence: Synthetic oligonucleotide
ttacacaataaaaacttacaa

SEQ ID NO: 26933 - RNA, 21 nt, synthetic construct
  source 1..21: mol_type = other RNA; note = Description of Artificial Sequence: Synthetic oligonucleotide
cttacacaataaaaacttaca

SEQ ID NO: 26934 - RNA, 21 nt, synthetic construct
  source 1..21: mol_type = other RNA; note = Description of Artificial Sequence: Synthetic oligonucleotide
acttacacaataaaaacttac

SEQ ID NO: 26935 - RNA, 21 nt, synthetic construct
  source 1..21: mol_type = other RNA; note = Description of Artificial Sequence: Synthetic oligonucleotide
aacttacacaataaaaactta

SEQ ID NO: 26936 - RNA, 21 nt, synthetic construct
  source 1..21: mol_type = other RNA; note = Description of Artificial Sequence: Synthetic oligonucleotide
aaacttacacaataaaaactt

SEQ ID NO: 26937 - RNA, 21 nt, synthetic construct
  source 1..21: mol_type = other RNA; note = Description of Artificial Sequence: Synthetic oligonucleotide
taaacttacacaataaaaact

SEQ ID NO: 26938 - RNA, 21 nt, synthetic construct
  source 1..21: mol_type = other RNA; note = Description of Artificial Sequence: Synthetic oligonucleotide
ataaacttacacaataaaaac

SEQ ID NO: 26939 - RNA, 21 nt, synthetic construct
  source 1..21: mol_type = other RNA; note = Description of Artificial Sequence: Synthetic oligonucleotide
tataaacttacacaataaaaa

SEQ ID NO: 26940 - RNA, 21 nt, synthetic construct
  source 1..21: mol_type = other RNA; note = Description of Artificial Sequence: Synthetic oligonucleotide
ttataaacttacacaataaaa

SEQ ID NO: 26941 - RNA, 21 nt, synthetic construct
  source 1..21: mol_type = other RNA; note = Description of Artificial Sequence: Synthetic oligonucleotide
attataaacttacacaataaa

SEQ ID NO: 26942 - RNA, 21 nt, synthetic construct
  source 1..21: mol_type = other RNA; note = Description of Artificial Sequence: Synthetic oligonucleotide
cattataaacttacacaataa

SEQ ID NO: 26943 - RNA, 21 nt, synthetic construct
  source 1..21: mol_type = other RNA; note = Description of Artificial Sequence: Synthetic oligonucleotide
gcattataaacttacacaata

SEQ ID NO: 26944 - RNA, 21 nt, synthetic construct
  source 1..21: mol_type = other RNA; note = Description of Artificial Sequence: Synthetic oligonucleotide
tgcattataaacttacacaat

SEQ ID NO: 26945 - RNA, 21 nt, synthetic construct
  source 1..21: mol_type = other RNA; note = Description of Artificial Sequence: Synthetic oligonucleotide
ctgcattataaacttacacaa

SEQ ID NO: 26946 - RNA, 21 nt, synthetic construct
  source 1..21: mol_type = other RNA; note = Description of Artificial Sequence: Synthetic oligonucleotide
cctgcattataaacttacaca

SEQ ID NO: 26947 - RNA, 21 nt, synthetic construct
  source 1..21: mol_type = other RNA; note = Description of Artificial Sequence: Synthetic oligonucleotide
ccctgcattataaacttacac

SEQ ID NO: 26948 - RNA, 21 nt, synthetic construct
  source 1..21: mol_type = other RNA; note = Description of Artificial Sequence: Synthetic oligonucleotide
cccctgcattataaacttaca

SEQ ID NO: 26949 - RNA, 21 nt, synthetic construct
  source 1..21: mol_type = other RNA; note = Description of Artificial Sequence: Synthetic oligonucleotide
tcccctgcattataaacttac

SEQ ID NO: 26950 - RNA, 21 nt, synthetic construct
  source 1..21: mol_type = other RNA; note = Description of Artificial Sequence: Synthetic oligonucleotide
ttcccctgcattataaactta

SEQ ID NO: 26951 - RNA, 21 nt, synthetic construct
  source 1..21: mol_type = other RNA; note = Description of Artificial Sequence: Synthetic oligonucleotide
cttcccctgcattataaactt

SEQ ID NO: 26952 - RNA, 21 nt, synthetic construct
  source 1..21: mol_type = other RNA; note = Description of Artificial Sequence: Synthetic oligonucleotide
acttcccctgcattataaact

SEQ ID NO: 26953 - RNA, 21 nt, synthetic construct
  source 1..21: mol_type = other RNA; note = Description of Artificial Sequence: Synthetic oligonucleotide
tacttcccctgcattataaac

SEQ ID NO: 26954 - RNA, 21 nt, synthetic construct
  source 1..21: mol_type = other RNA; note = Description of Artificial Sequence: Synthetic oligonucleotide
gtacttcccctgcattataaa

SEQ ID NO: 26955 - RNA, 21 nt, synthetic construct
  source 1..21: mol_type = other RNA; note = Description of Artificial Sequence: Synthetic oligonucleotide
agtacttcccctgcattataa

SEQ ID NO: 26956 - RNA, 21 nt, synthetic construct
  source 1..21: mol_type = other RNA; note = Description of Artificial Sequence: Synthetic oligonucleotide
tagtacttcccctgcattata

SEQ ID NO: 26957 - RNA, 21 nt, synthetic construct
  source 1..21: mol_type = other RNA; note = Description of Artificial Sequence: Synthetic oligonucleotide
gtagtacttcccctgcattat

SEQ ID NO: 26958 - RNA, 21 nt, synthetic construct
  source 1..21: mol_type = other RNA; note = Description of Artificial Sequence: Synthetic oligonucleotide
agtagtacttcccctgcatta

SEQ ID NO: 26959 - RNA, 21 nt, synthetic construct
  source 1..21: mol_type = other RNA; note = Description of Artificial Sequence: Synthetic oligonucleotide
gagtagtacttcccctgcatt

SEQ ID NO: 26960 - RNA, 21 nt, synthetic construct
  source 1..21: mol_type = other RNA; note = Description of Artificial Sequence: Synthetic oligonucleotide
ggagtagtacttcccctgcat

SEQ ID NO: 26961 - RNA, 21 nt, synthetic construct
  source 1..21: mol_type = other RNA; note = Description of Artificial Sequence: Synthetic oligonucleotide
aggagtagtacttcccctgca

SEQ ID NO: 26962 - RNA, 21 nt, synthetic construct
  source 1..21: mol_type = other RNA; note = Description of Artificial Sequence: Synthetic oligonucleotide
gaggagtagtacttcccctgc

SEQ ID NO: 26963 - RNA, 21 nt, synthetic construct
  source 1..21: mol_type = other RNA; note = Description of Artificial Sequence: Synthetic oligonucleotide
tgaggagtagtacttcccctg

SEQ ID NO: 26964 - RNA, 21 nt, synthetic construct
  source 1..21: mol_type = other RNA; note = Description of Artificial Sequence: Synthetic oligonucleotide
ttgaggagtagtacttcccct

SEQ ID NO: 26965 - RNA, 21 nt, synthetic construct
  source 1..21: mol_type = other RNA; note = Description of Artificial Sequence: Synthetic oligonucleotide
tttgaggagtagtacttcccc

SEQ ID NO: 26966 - RNA, 21 nt, synthetic construct
  source 1..21: mol_type = other RNA; note = Description of Artificial Sequence: Synthetic oligonucleotide
atttgaggagtagtacttccc

SEQ ID NO: 26967 - RNA, 21 nt, synthetic construct
  source 1..21: mol_type = other RNA; note = Description of Artificial Sequence: Synthetic oligonucleotide
catttgaggagtagtacttcc

SEQ ID NO: 26968 - RNA, 21 nt, synthetic construct
  source 1..21: mol_type = other RNA; note = Description of Artificial Sequence: Synthetic oligonucleotide
acatttgaggagtagtacttc

SEQ ID NO: 26969 - RNA, 21 nt, synthetic construct
  source 1..21: mol_type = other RNA; note = Description of Artificial Sequence: Synthetic oligonucleotide
aacatttgaggagtagtactt

SEQ ID NO: 26970 - RNA, 21 nt, synthetic construct
  source 1..21: mol_type = other RNA; note = Description of Artificial Sequence: Synthetic oligonucleotide
caacatttgaggagtagtact

SEQ ID NO: 26971 - RNA, 21 nt, synthetic construct
  source 1..21: mol_type = other RNA; note = Description of Artificial Sequence: Synthetic oligonucleotide
tcaacatttgaggagtagtac

SEQ ID NO: 26972 - RNA, 21 nt, synthetic construct
  source 1..21: mol_type = other RNA; note = Description of Artificial Sequence: Synthetic oligonucleotide
ctcaacatttgaggagtagta

SEQ ID NO: 26973 - RNA, 21 nt, synthetic construct
  source 1..21: mol_type = other RNA; note = Description of Artificial Sequence: Synthetic oligonucleotide
cctcaacatttgaggagtagt

SEQ ID NO: 26974 - RNA, 21 nt, synthetic construct
  source 1..21: mol_type = other RNA; note = Description of Artificial Sequence: Synthetic oligonucleotide
ccctcaacatttgaggagtag

SEQ ID NO: 26975 - RNA, 21 nt, synthetic construct
  source 1..21: mol_type = other RNA; note = Description of Artificial Sequence: Synthetic oligonucleotide
tccctcaacatttgaggagta

SEQ ID NO: 26976 - RNA, 21 nt, synthetic construct
  source 1..21: mol_type = other RNA; note = Description of Artificial Sequence: Synthetic oligonucleotide
ttccctcaacatttgaggagt

SEQ ID NO: 26977 - RNA, 21 nt, synthetic construct
  source 1..21: mol_type = other RNA; note = Description of Artificial Sequence: Synthetic oligonucleotide
cttccctcaacatttgaggag

SEQ ID NO: 26978 - RNA, 21 nt, synthetic construct
  source 1..21: mol_type = other RNA; note = Description of Artificial Sequence: Synthetic oligonucleotide
gcttccctcaacatttgagga

SEQ ID NO: 26979 - RNA, 21 nt, synthetic construct
  source 1..21: mol_type = other RNA; note = Description of Artificial Sequence: Synthetic oligonucleotide
agcttccctcaacatttgagg

SEQ ID NO: 26980 - RNA, 21 nt, synthetic construct
  source 1..21: mol_type = other RNA; note = Description of Artificial Sequence: Synthetic oligonucleotide
aagcttccctcaacatttgag

SEQ ID NO: 26981 - RNA, 21 nt, synthetic construct
  source 1..21: mol_type = other RNA; note = Description of Artificial Sequence: Synthetic oligonucleotide
gaagcttccctcaacatttga

SEQ ID NO: 26982 - RNA, 21 nt, synthetic construct
  source 1..21: mol_type = other RNA; note = Description of Artificial Sequence: Synthetic oligonucleotide
ggaagcttccctcaacatttg

SEQ ID NO: 26983 - RNA, 21 nt, synthetic construct
  source 1..21: mol_type = other RNA; note = Description of Artificial Sequence: Synthetic oligonucleotide
tggaagcttccctcaacattt

SEQ ID NO: 26984 - RNA, 21 nt, synthetic construct
  source 1..21: mol_type = other RNA; note = Description of Artificial Sequence: Synthetic oligonucleotide
atggaagcttccctcaacatt

SEQ ID NO: 26985 - RNA, 21 nt, synthetic construct
  source 1..21: mol_type = other RNA; note = Description of Artificial Sequence: Synthetic oligonucleotide
tatggaagcttccctcaacat

SEQ ID NO: 26986 - RNA, 21 nt, synthetic construct
  source 1..21: mol_type = other RNA; note = Description of Artificial Sequence: Synthetic oligonucleotide
ttatggaagcttccctcaaca

SEQ ID NO: 26987 - RNA, 21 nt, synthetic construct
  source 1..21: mol_type = other RNA; note = Description of Artificial Sequence: Synthetic oligonucleotide
gttatggaagcttccctcaac

SEQ ID NO: 26988 - RNA, 21 nt, synthetic construct
  source 1..21: mol_type = other RNA; note = Description of Artificial Sequence: Synthetic oligonucleotide
tgttatggaagcttccctcaa

SEQ ID NO: 26989 - RNA, 21 nt, synthetic construct
  source 1..21: mol_type = other RNA; note = Description of Artificial Sequence: Synthetic oligonucleotide
atgttatggaagcttccctca

SEQ ID NO: 26990 - RNA, 21 nt, synthetic construct
  source 1..21: mol_type = other RNA; note = Description of Artificial Sequence: Synthetic oligonucleotide
aatgttatggaagcttccctc

SEQ ID NO: 26991 - RNA, 21 nt, synthetic construct
  source 1..21: mol_type = other RNA; note = Description of Artificial Sequence: Synthetic oligonucleotide
caatgttatggaagcttccct

SEQ ID NO: 26992 - RNA, 21 nt, synthetic construct
  source 1..21: mol_type = other RNA; note = Description of Artificial Sequence: Synthetic oligonucleotide
tcaatgttatggaagcttccc

SEQ ID NO: 26993 - RNA, 21 nt, synthetic construct
  source 1..21: mol_type = other RNA; note = Description of Artificial Sequence: Synthetic oligonucleotide
atcaatgttatggaagcttcc

SEQ ID NO: 26994 - RNA, 21 nt, synthetic construct
  source 1..21: mol_type = other RNA; note = Description of Artificial Sequence: Synthetic oligonucleotide
catcaatgttatggaagcttc

SEQ ID NO: 26995 - RNA, 21 nt, synthetic construct
  source 1..21: mol_type = other RNA; note = Description of Artificial Sequence: Synthetic oligonucleotide
tcatcaatgttatggaagctt

SEQ ID NO: 26996 - RNA, 21 nt, synthetic construct
  source 1..21: mol_type = other RNA; note = Description of Artificial Sequence: Synthetic oligonucleotide
gtcatcaatgttatggaagct

SEQ ID NO: 26997 - RNA, 21 nt, synthetic construct
  source 1..21: mol_type = other RNA; note = Description of Artificial Sequence: Synthetic oligonucleotide
agtcatcaatgttatggaagc

SEQ ID NO: 26998 - RNA, 21 nt, synthetic construct
  source 1..21: mol_type = other RNA; note = Description of Artificial Sequence: Synthetic oligonucleotide
cagtcatcaatgttatggaag

SEQ ID NO: 26999 - RNA, 21 nt, synthetic construct
  source 1..21: mol_type = other RNA; note = Description of Artificial Sequence: Synthetic oligonucleotide
ccagtcatcaatgttatggaa

SEQ ID NO: 27000 - RNA, 21 nt, synthetic construct
  source 1..21: mol_type = other RNA; note = Description of Artificial Sequence: Synthetic oligonucleotide
gccagtcatcaatgttatgga

SEQ ID NO: 27001 - RNA, 21 nt, synthetic construct
  source 1..21: mol_type = other RNA; note = Description of Artificial Sequence: Synthetic oligonucleotide
agccagtcatcaatgttatgg

SEQ ID NO: 27002 - RNA, 21 nt, synthetic construct
  source 1..21: mol_type = other RNA; note = Description of Artificial Sequence: Synthetic oligonucleotide
aagccagtcatcaatgttatg

SEQ ID NO: 27003 - RNA, 21 nt, synthetic construct
  source 1..21: mol_type = other RNA; note = Description of Artificial Sequence: Synthetic oligonucleotide
gaagccagtcatcaatgttat

SEQ ID NO: 27004 - RNA, 21 nt, synthetic construct
  source 1..21: mol_type = other RNA; note = Description of Artificial Sequence: Synthetic oligonucleotide
tgaagccagtcatcaatgtta

SEQ ID NO: 27005 - RNA, 21 nt, synthetic construct
  source 1..21: mol_type = other RNA; note = Description of Artificial Sequence: Synthetic oligonucleotide
atgaagccagtcatcaatgtt

SEQ ID NO: 27006 - RNA, 21 nt, synthetic construct
  source 1..21: mol_type = other RNA; note = Description of Artificial Sequence: Synthetic oligonucleotide
catgaagccagtcatcaatgt

SEQ ID NO: 27007 - RNA, 21 nt, synthetic construct
  source 1..21: mol_type = other RNA; note = Description of Artificial Sequence: Synthetic oligonucleotide
ccatgaagccagtcatcaatg

SEQ ID NO: 27008 - RNA, 21 nt, synthetic construct
  source 1..21: mol_type = other RNA; note = Description of Artificial Sequence: Synthetic oligonucleotide
gccatgaagccagtcatcaat

SEQ ID NO: 27009 - RNA, 21 nt, synthetic construct
  source 1..21: mol_type = other RNA; note = Description of Artificial Sequence: Synthetic oligonucleotide
tgccatgaagccagtcatcaa

SEQ ID NO: 27010 - RNA, 21 nt, synthetic construct
  source 1..21: mol_type = other RNA; note = Description of Artificial Sequence: Synthetic oligonucleotide
ctgccatgaagccagtcatca

SEQ ID NO: 27011 - RNA, 21 nt, synthetic construct
  source 1..21: mol_type = other RNA; note = Description of Artificial Sequence: Synthetic oligonucleotide
actgccatgaagccagtcatc

SEQ ID NO: 27012 - RNA, 21 nt, synthetic construct
  source 1..21: mol_type = other RNA; note = Description of Artificial Sequence: Synthetic oligonucleotide
tactgccatgaagccagtcat

SEQ ID NO: 27013 - RNA, 21 nt, synthetic construct
  source 1..21: mol_type = other RNA; note = Description of Artificial Sequence: Synthetic oligonucleotide
ttactgccatgaagccagtca

SEQ ID NO: 27014 - RNA, 21 nt, synthetic construct
  source 1..21: mol_type = other RNA; note = Description of Artificial Sequence: Synthetic oligonucleotide
attactgccatgaagccagtc

SEQ ID NO: 27015 - RNA, 21 nt, synthetic construct
  source 1..21: mol_type = other RNA; note = Description of Artificial Sequence: Synthetic oligonucleotide
aattactgccatgaagccagt

SEQ ID NO: 27016 - RNA, 21 nt, synthetic construct
  source 1..21: mol_type = other RNA; note = Description of Artificial Sequence: Synthetic oligonucleotide
gaattactgccatgaagccag

SEQ ID NO: 27017 - RNA, 21 nt, synthetic construct
  source 1..21: mol_type = other RNA; note = Description of Artificial Sequence: Synthetic oligonucleotide
agaattactgccatgaagcca

SEQ ID NO: 27018 - RNA, 21 nt, synthetic construct
  source 1..21: mol_type = other RNA; note = Description of Artificial Sequence: Synthetic oligonucleotide
gagaattactgccatgaagcc

SEQ ID NO: 27019 - RNA, 21 nt, synthetic construct
  source 1..21: mol_type = other RNA; note = Description of Artificial Sequence: Synthetic oligonucleotide
cgagaattactgccatgaagc

SEQ ID NO: 27020 - RNA, 21 nt, synthetic construct
  source 1..21: mol_type = other RNA; note = Description of Artificial Sequence: Synthetic oligonucleotide
ccgagaattactgccatgaag

SEQ ID NO: 27021 - RNA, 21 nt, synthetic construct
  source 1..21: mol_type = other RNA; note = Description of Artificial Sequence: Synthetic oligonucleotide
gccgagaattactgccatgaa

SEQ ID NO: 27022 - RNA, 21 nt, synthetic construct
  source 1..21: mol_type = other RNA; note = Description of Artificial Sequence: Synthetic oligonucleotide
agccgagaattactgccatga

SEQ ID NO: 27023 - RNA, 21 nt, synthetic construct
  source 1..21: mol_type = other RNA; note = Description of Artificial Sequence: Synthetic oligonucleotide
cagccgagaattactgccatg

SEQ ID NO: 27024 - RNA, 21 nt, synthetic construct
  source 1..21: mol_type = other RNA; note = Description of Artificial Sequence: Synthetic oligonucleotide
acagccgagaattactgccat

SEQ ID NO: 27025 - RNA, 21 nt, synthetic construct
  source 1..21: mol_type = other RNA; note = Description of Artificial Sequence: Synthetic oligonucleotide
tacagccgagaattactgcca

SEQ ID NO: 27026 - RNA, 21 nt, synthetic construct
  source 1..21: mol_type = other RNA; note = Description of Artificial Sequence: Synthetic oligonucleotide
ctacagccgagaattactgcc

SEQ ID NO: 27027 - RNA, 21 nt, synthetic construct
  source 1..21: mol_type = other RNA; note = Description of Artificial Sequence: Synthetic oligonucleotide
actacagccgagaattactgc

SEQ ID NO: 27028 - RNA, 21 nt, synthetic construct
  source 1..21: mol_type = other RNA; note = Description of Artificial Sequence: Synthetic oligonucleotide
aactacagccgagaattactg

SEQ ID NO: 27029 - RNA, 21 nt, synthetic construct
  source 1..21: mol_type = other RNA; note = Description of Artificial Sequence: Synthetic oligonucleotide
caactacagccgagaattact

SEQ ID NO: 27030 - RNA, 21 nt, synthetic construct
  source 1..21: mol_type = other RNA; note = Description of Artificial Sequence: Synthetic oligonucleotide
gcaactacagccgagaattac

SEQ ID NO: 27031 - RNA, 21 nt, synthetic construct
  source 1..21: mol_type = other RNA; note = Description of Artificial Sequence: Synthetic oligonucleotide
tgcaactacagccgagaatta

SEQ ID NO: 27032 - RNA, 21 nt, synthetic construct
  source 1..21: mol_type = other RNA; note = Description of Artificial Sequence: Synthetic oligonucleotide
atgcaactacagccgagaatt

SEQ ID NO: 27033 - RNA, 21 nt, synthetic construct
  source 1..21: mol_type = other RNA; note = Description of Artificial Sequence: Synthetic oligonucleotide
tatgcaactacagccgagaat

SEQ ID NO: 27034 - RNA, 21 nt, synthetic construct
  source 1..21: mol_type = other RNA; note = Description of Artificial Sequence: Synthetic oligonucleotide
ttatgcaactacagccgagaa

SEQ ID NO: 27035 - RNA, 21 nt, synthetic construct
  source 1..21: mol_type = other RNA; note = Description of Artificial Sequence: Synthetic oligonucleotide
cttatgcaactacagccgaga

SEQ ID NO: 27036 - RNA, 21 nt, synthetic construct
  source 1..21: mol_type = other RNA; note = Description of Artificial Sequence: Synthetic oligonucleotide
gcttatgcaactacagccgag

SEQ ID NO: 27037 - RNA, 21 nt, synthetic construct
  source 1..21: mol_type = other RNA; note = Description of Artificial Sequence: Synthetic oligonucleotide
tgcttatgcaactacagccga

SEQ ID NO: 27038 - RNA, 21 nt, synthetic construct
  source 1..21: mol_type = other RNA; note = Description of Artificial Sequence: Synthetic oligonucleotide
atgcttatgcaactacagccg

SEQ ID NO: 27039 - RNA, 21 nt, synthetic construct
  source 1..21: mol_type = other RNA; note = Description of Artificial Sequence: Synthetic oligonucleotide
aatgcttatgcaactacagcc

SEQ ID NO: 27040 - RNA, 21 nt, synthetic construct
  source 1..21: mol_type = other RNA; note = Description of Artificial Sequence: Synthetic oligonucleotide
caatgcttatgcaactacagc

SEQ ID NO: 27041 - RNA, 21 nt, synthetic construct
  source 1..21: mol_type = other RNA; note = Description of Artificial Sequence: Synthetic oligonucleotide
gcaatgcttatgcaactacag

SEQ ID NO: 27042 - RNA, 21 nt, synthetic construct
  source 1..21: mol_type = other RNA; note = Description of Artificial Sequence: Synthetic oligonucleotide
agcaatgcttatgcaactaca

SEQ ID NO: 27043 - RNA, 21 nt, synthetic construct
  source 1..21: mol_type = other RNA; note = Description of Artificial Sequence: Synthetic oligonucleotide
gagcaatgcttatgcaactac

SEQ ID NO: 27044 - RNA, 21 nt, synthetic construct
  source 1..21: mol_type = other RNA; note = Description of Artificial Sequence: Synthetic oligonucleotide
tgagcaatgcttatgcaacta

SEQ ID NO: 27045 - RNA, 21 nt, synthetic construct
  source 1..21: mol_type = other RNA; note = Description of Artificial Sequence: Synthetic oligonucleotide
ttgagcaatgcttatgcaact

SEQ ID NO: 27046 - RNA, 21 nt, synthetic construct
  source 1..21: mol_type = other RNA; note = Description of Artificial Sequence: Synthetic oligonucleotide
cttgagcaatgcttatgcaac

SEQ ID NO: 27047 - RNA, 21 nt, synthetic construct
  source 1..21: mol_type = other RNA; note = Description of Artificial Sequence: Synthetic oligonucleotide
tcttgagcaatgcttatgcaa

SEQ ID NO: 27048 - RNA, 21 nt, synthetic construct
  source 1..21: mol_type = other RNA; note = Description of Artificial Sequence: Synthetic oligonucleotide
ctcttgagcaatgcttatgca

SEQ ID NO: 27049 - RNA, 21 nt, synthetic construct
  source 1..21: mol_type = other RNA; note = Description of Artificial Sequence: Synthetic oligonucleotide
cctcttgagcaatgcttatgc

SEQ ID NO: 27050 - RNA, 21 nt, synthetic construct
  source 1..21: mol_type = other RNA; note = Description of Artificial Sequence: Synthetic oligonucleotide
tcctcttgagcaatgcttatg

SEQ ID NO: 27051 - RNA, 21 nt, synthetic construct
  source 1..21: mol_type = other RNA; note = Description of Artificial Sequence: Synthetic oligonucleotide
ttcctcttgagcaatgcttat

SEQ ID NO: 27052 - RNA, 21 nt, synthetic construct
  source 1..21: mol_type = other RNA; note = Description of Artificial Sequence: Synthetic oligonucleotide
tttcctcttgagcaatgctta

SEQ ID NO: 27053 - RNA, 21 nt, synthetic construct
  source 1..21: mol_type = other RNA; note = Description of Artificial Sequence: Synthetic oligonucleotide
ttttcctcttgagcaatgctt

SEQ ID NO: 27054 - RNA, 21 nt, synthetic construct
  source 1..21: mol_type = other RNA; note = Description of Artificial Sequence: Synthetic oligonucleotide
attttcctcttgagcaatgct

SEQ ID NO: 27055 - RNA, 21 nt, synthetic construct
  source 1..21: mol_type = other RNA; note = Description of Artificial Sequence: Synthetic oligonucleotide
gattttcctcttgagcaatgc

SEQ ID NO: 27056 - RNA, 21 nt, synthetic construct
  source 1..21: mol_type = other RNA; note = Description of Artificial Sequence: Synthetic oligonucleotide
ggattttcctcttgagcaatg

SEQ ID NO: 27057 - RNA, 21 nt, synthetic construct
  source 1..21: mol_type = other RNA; note = Description of Artificial Sequence: Synthetic oligonucleotide
tggattttcctcttgagcaat

SEQ ID NO: 27058 - RNA, 21 nt, synthetic construct
  source 1..21: mol_type = other RNA; note = Description of Artificial Sequence: Synthetic oligonucleotide
ttggattttcctcttgagcaa

SEQ ID NO: 27059 - RNA, 21 nt, synthetic construct
  source 1..21: mol_type = other RNA; note = Description of Artificial Sequence: Synthetic oligonucleotide
tttggattttcctcttgagca

SEQ ID NO: 27060 - RNA, 21 nt, synthetic construct
  source 1..21: mol_type = other RNA; note = Description of Artificial Sequence: Synthetic oligonucleotide
ttttggattttcctcttgagc

SEQ ID NO: 27061 - RNA, 21 nt, synthetic construct
  source 1..21: mol_type = other RNA; note = Description of Artificial Sequence: Synthetic oligonucleotide
cttttggattttcctcttgag

SEQ ID NO: 27062 - RNA, 21 nt, synthetic construct
  source 1..21: mol_type = other RNA; note = Description of Artificial Sequence: Synthetic oligonucleotide
acttttggattttcctcttga

SEQ ID NO: 27063 - RNA, 21 nt, synthetic construct
  source 1..21: mol_type = other RNA; note = Description of Artificial Sequence: Synthetic oligonucleotide
cacttttggattttcctcttg

SEQ ID NO: 27064 - RNA, 21 nt, synthetic construct
  source 1..21: mol_type = other RNA; note = Description of Artificial Sequence: Synthetic oligonucleotide
gcacttttggattttcctctt

SEQ ID NO: 27065 - RNA, 21 nt, synthetic construct
  source 1..21: mol_type = other RNA; note = Description of Artificial Sequence: Synthetic oligonucleotide
tgcacttttggattttcctct

SEQ ID NO: 27066 - RNA, 21 nt, synthetic construct
  source 1..21: mol_type = other RNA; note = Description of Artificial Sequence: Synthetic oligonucleotide
ctgcacttttggattttcctc

SEQ ID NO: 27067 - RNA, 21 nt, synthetic construct
  source 1..21: mol_type = other RNA; note = Description of Artificial Sequence: Synthetic oligonucleotide
gctgcacttttggattttcct

SEQ ID NO: 27068 - RNA, 21 nt, synthetic construct
  source 1..21: mol_type = other RNA; note = Description of Artificial Sequence: Synthetic oligonucleotide
tgctgcacttttggattttcc

SEQ ID NO: 27069 - RNA, 21 nt, synthetic construct
  source 1..21: mol_type = other RNA; note = Description of Artificial Sequence: Synthetic oligonucleotide
ctgctgcacttttggattttc

SEQ ID NO: 27070 - RNA, 21 nt, synthetic construct
  source 1..21: mol_type = other RNA; note = Description of Artificial Sequence: Synthetic oligonucleotide
cctgctgcacttttggatttt

SEQ ID NO: 27071 - RNA, 21 nt, synthetic construct
  source 1..21: mol_type = other RNA; note = Description of Artificial Sequence: Synthetic oligonucleotide
tcctgctgcacttttggattt

SEQ ID NO: 27072 - RNA, 21 nt, synthetic construct
  source 1..21: mol_type = other RNA; note = Description of Artificial Sequence: Synthetic oligonucleotide
ctcctgctgcacttttggatt

SEQ ID NO: 27073 - RNA, 21 nt, synthetic construct
  source 1..21: mol_type = other RNA; note = Description of Artificial Sequence: Synthetic oligonucleotide
tctcctgctgcacttttggat

SEQ ID NO: 27074 - RNA, 21 nt, synthetic construct
  source 1..21: mol_type = other RNA; note = Description of Artificial Sequence: Synthetic oligonucleotide
ttctcctgctgcacttttgga

SEQ ID NO: 27075 - RNA, 21 nt, synthetic construct
  source 1..21: mol_type = other RNA; note = Description of Artificial Sequence: Synthetic oligonucleotide
gttctcctgctgcacttttgg

SEQ ID NO: 27076 - RNA, 21 nt, synthetic construct
  source 1..21: mol_type = other RNA; note = Description of Artificial Sequence: Synthetic oligonucleotide
agttctcctgctgcacttttg

SEQ ID NO: 27077 - RNA, 21 nt, synthetic construct
  source 1..21: mol_type = other RNA; note = Description of Artificial Sequence: Synthetic oligonucleotide
gagttctcctgctgcactttt

SEQ ID NO: 27078 - RNA, 21 nt, synthetic construct
  source 1..21: mol_type = other RNA; note = Description of Artificial Sequence: Synthetic oligonucleotide
agagttctcctgctgcacttt

SEQ ID NO: 27079 - RNA, 21 nt, synthetic construct
  source 1..21: mol_type = other RNA; note = Description of Artificial Sequence: Synthetic oligonucleotide
aagagttctcctgctgcactt

SEQ ID NO: 27080 - RNA, 21 nt, synthetic construct
  source 1..21: mol_type = other RNA; note = Description of Artificial Sequence: Synthetic oligonucleotide
aaagagttctcctgctgcact

SEQ ID NO: 27081 - RNA, 21 nt, synthetic construct
  source 1..21: mol_type = other RNA; note = Description of Artificial Sequence: Synthetic oligonucleotide
aaaagagttctcctgctgcac

SEQ ID NO: 27082 - RNA, 21 nt, synthetic construct
  source 1..21: mol_type = other RNA; note = Description of Artificial Sequence: Synthetic oligonucleotide
gaaaagagttctcctgctgca

SEQ ID NO: 27083 - RNA, 21 nt, synthetic construct
  source 1..21: mol_type = other RNA; note = Description of Artificial Sequence: Synthetic oligonucleotide
ggaaaagagttctcctgctgc

SEQ ID NO: 27084 - RNA, 21 nt, synthetic construct
  source 1..21: mol_type = other RNA; note = Description of Artificial Sequence: Synthetic oligonucleotide
gggaaaagagttctcctgctg

SEQ ID NO: 27085 - RNA, 21 nt, synthetic construct
  source 1..21: mol_type = other RNA; note = Description of Artificial Sequence: Synthetic oligonucleotide
agggaaaagagttctcctgct

SEQ ID NO: 27086 - RNA, 21 nt, synthetic construct
  source 1..21: mol_type = other RNA; note = Description of Artificial Sequence: Synthetic oligonucleotide
cagggaaaagagttctcctgc

SEQ ID NO: 27087 - RNA, 21 nt, synthetic construct
  source 1..21: mol_type = other RNA; note = Description of Artificial Sequence: Synthetic oligonucleotide
tcagggaaaagagttctcctg

SEQ ID NO: 27088 - RNA, 21 nt, synthetic construct
  source 1..21: mol_type = other RNA; note = Description of Artificial Sequence: Synthetic oligonucleotide
ttcagggaaaagagttctcct

SEQ ID NO: 27089 - RNA, 21 nt, synthetic construct
  source 1..21: mol_type = other RNA; note = Description of Artificial Sequence: Synthetic oligonucleotide
tttcagggaaaagagttctcc

SEQ ID NO: 27090 - RNA, 21 nt, synthetic construct
  source 1..21: mol_type = other RNA; note = Description of Artificial Sequence: Synthetic oligonucleotide
ttttcagggaaaagagttctc

SEQ ID NO: 27091 - RNA, 21 nt, synthetic construct
  source 1..21: mol_type = other RNA; note = Description of Artificial Sequence: Synthetic oligonucleotide
tttttcagggaaaagagttct

SEQ ID NO: 27092 - RNA, 21 nt, synthetic construct
  source 1..21: mol_type = other RNA; note = Description of Artificial Sequence: Synthetic oligonucleotide
ctttttcagggaaaagagttc

SEQ ID NO: 27093 - RNA, 21 nt, synthetic construct
  source 1..21: mol_type = other RNA; note = Description of Artificial Sequence: Synthetic oligonucleotide
cctttttcagggaaaagagtt

SEQ ID NO: 27094 - RNA, 21 nt, synthetic construct
  source 1..21: mol_type = other RNA; note = Description of Artificial Sequence: Synthetic oligonucleotide
tcctttttcagggaaaagagt

SEQ ID NO: 27095 - RNA, 21 nt, synthetic construct
  source 1..21: mol_type = other RNA; note = Description of Artificial Sequence: Synthetic oligonucleotide
ttcctttttcagggaaaagag

SEQ ID NO: 27096 - RNA, 21 nt, synthetic construct
  source 1..21: mol_type = other RNA; note = Description of Artificial Sequence: Synthetic oligonucleotide
tttcctttttcagggaaaaga

SEQ ID NO: 27097 - RNA, 21 nt, synthetic construct
  source 1..21: mol_type = other RNA; note = Description of Artificial Sequence: Synthetic oligonucleotide
ttttcctttttcagggaaaag

SEQ ID NO: 27098 - RNA, 21 nt, synthetic construct
  source 1..21: mol_type = other RNA; note = Description of Artificial Sequence: Synthetic oligonucleotide
tttttcctttttcagggaaaa

SEQ ID NO: 27099 - RNA, 21 nt, synthetic construct
  source 1..21: mol_type = other RNA; note = Description of Artificial Sequence: Synthetic oligonucleotide
atttttcctttttcagggaaa

SEQ ID NO: 27100 - RNA, 21 nt, synthetic construct
  source 1..21: mol_type = other RNA; note = Description of Artificial Sequence: Synthetic oligonucleotide
tatttttcctttttcagggaa

SEQ ID NO: 27101 - RNA, 21 nt, synthetic construct
  source 1..21: mol_type = other RNA; note = Description of Artificial Sequence: Synthetic oligonucleotide
atatttttcctttttcaggga

SEQ ID NO: 27102 - RNA, 21 nt, synthetic construct
  source 1..21: mol_type = other RNA; note = Description of Artificial Sequence: Synthetic oligonucleotide
aatatttttcctttttcaggg

SEQ ID NO: 27103 - RNA, 21 nt, synthetic construct
  source 1..21: mol_type = other RNA; note = Description of Artificial Sequence: Synthetic oligonucleotide
caatatttttcctttttcagg

SEQ ID NO: 27104 - RNA, 21 nt, synthetic construct
  source 1..21: mol_type = other RNA; note = Description of Artificial Sequence: Synthetic oligonucleotide
tcaatatttttcctttttcag

SEQ ID NO: 27105 - RNA, 21 nt, synthetic construct
  source 1..21: mol_type = other RNA; note = Description of Artificial Sequence: Synthetic oligonucleotide
ttcaatatttttcctttttca

SEQ ID NO: 27106 - RNA, 21 nt, synthetic construct
  source 1..21: mol_type = other RNA; note = Description of Artificial Sequence: Synthetic oligonucleotide
gttcaatatttttcctttttc

SEQ ID NO: 27107 - RNA, 21 nt, synthetic construct
  source 1..21: mol_type = other RNA; note = Description of Artificial Sequence: Synthetic oligonucleotide
agttcaatatttttccttttt

SEQ ID NO: 27108 - RNA, 21 nt, synthetic construct
  source 1..21: mol_type = other RNA; note = Description of Artificial Sequence: Synthetic oligonucleotide
gagttcaatatttttcctttt

SEQ ID NO: 27109 - RNA, 21 nt, synthetic construct
  source 1..21: mol_type = other RNA; note = Description of Artificial Sequence: Synthetic oligonucleotide
tgagttcaatatttttccttt

SEQ ID NO: 27110 - RNA, 21 nt, synthetic construct
  source 1..21: mol_type = other RNA; note = Description of Artificial Sequence: Synthetic oligonucleotide
ttgagttcaatatttttcctt

SEQ ID NO: 27111 - RNA, 21 nt, synthetic construct
  source 1..21: mol_type = other RNA; note = Description of Artificial Sequence: Synthetic oligonucleotide
attgagttcaatatttttcct

SEQ ID NO: 27112 - RNA, 21 nt, synthetic construct
  source 1..21: mol_type = other RNA; note = Description of Artificial Sequence: Synthetic oligonucleotide
cattgagttcaatatttttcc

SEQ ID NO: 27113 - RNA, 21 nt, synthetic construct
  source 1..21: mol_type = other RNA; note = Description of Artificial Sequence: Synthetic oligonucleotide
tcattgagttcaatatttttc

SEQ ID NO: 27114 - RNA, 21 nt, synthetic construct
  source 1..21: mol_type = other RNA; note = Description of Artificial Sequence: Synthetic oligonucleotide
atcattgagttcaatattttt

SEQ ID NO: 27115 - RNA, 21 nt, synthetic construct
  source 1..21: mol_type = other RNA; note = Description of Artificial Sequence: Synthetic oligonucleotide
tatcattgagttcaatatttt

SEQ ID NO: 27116 - RNA, 21 nt, synthetic construct
  source 1..21: mol_type = other RNA; note = Description of Artificial Sequence: Synthetic oligonucleotide
ctatcattgagttcaatattt

SEQ ID NO: 27117 - RNA, 21 nt, synthetic construct
  source 1..21: mol_type = other RNA; note = Description of Artificial Sequence: Synthetic oligonucleotide
gctatcattgagttcaatatt

SEQ ID NO: 27118 - RNA, 21 nt, synthetic construct
  source 1..21: mol_type = other RNA; note = Description of Artificial Sequence: Synthetic oligonucleotide
tgctatcattgagttcaatat

SEQ ID NO: 27119 - RNA, 21 nt, synthetic construct
  source 1..21: mol_type = other RNA; note = Description of Artificial Sequence: Synthetic oligonucleotide
gtgctatcattgagttcaata

SEQ ID NO: 27120 - RNA, 21 nt, synthetic construct
  source 1..21: mol_type = other RNA; note = Description of Artificial Sequence: Synthetic oligonucleotide
ggtgctatcattgagttcaat

SEQ ID NO: 27121 - RNA, 21 nt, synthetic construct
  source 1..21: mol_type = other RNA; note = Description of Artificial Sequence: Synthetic oligonucleotide
aggtgctatcattgagttcaa

SEQ ID NO: 27122 - RNA, 21 nt, synthetic construct
  source 1..21: mol_type = other RNA; note = Description of Artificial Sequence: Synthetic oligonucleotide
taggtgctatcattgagttca

SEQ ID NO: 27123 - RNA, 21 nt, synthetic construct
  source 1..21: mol_type = other RNA; note = Description of Artificial Sequence: Synthetic oligonucleotide
ttaggtgctatcattgagttc

SEQ ID NO: 27124 - RNA, 21 nt, synthetic construct
  source 1..21: mol_type = other RNA; note = Description of Artificial Sequence: Synthetic oligonucleotide
tttaggtgctatcattgagtt

SEQ ID NO: 27125 - RNA, 21 nt, synthetic construct
  source 1..21: mol_type = other RNA; note = Description of Artificial Sequence: Synthetic oligonucleotide
gtttaggtgctatcattgagt

SEQ ID NO: 27126 - RNA, 21 nt, synthetic construct
  source 1..21: mol_type = other RNA; note = Description of Artificial Sequence: Synthetic oligonucleotide
agtttaggtgctatcattgag

SEQ ID NO: 27127 - RNA, 21 nt, synthetic construct
  source 1..21: mol_type = other RNA; note = Description of Artificial Sequence: Synthetic oligonucleotide
aagtttaggtgctatcattga

SEQ ID NO: 27128 - RNA, 21 nt, synthetic construct
  source 1..21: mol_type = other RNA; note = Description of Artificial Sequence: Synthetic oligonucleotide
taagtttaggtgctatcattg

SEQ ID NO: 27129 - RNA, 21 nt, synthetic construct
  source 1..21: mol_type = other RNA; note = Description of Artificial Sequence: Synthetic oligonucleotide
gtaagtttaggtgctatcatt

SEQ ID NO: 27130 - RNA, 21 nt, synthetic construct
  source 1..21: mol_type = other RNA; note = Description of Artificial Sequence: Synthetic oligonucleotide
tgtaagtttaggtgctatcat

SEQ ID NO: 27131 - RNA, 21 nt, synthetic construct
  source 1..21: mol_type = other RNA; note = Description of Artificial Sequence: Synthetic oligonucleotide
atgtaagtttaggtgctatca

SEQ ID NO: 27132 - RNA, 21 nt, synthetic construct
  source 1..21: mol_type = other RNA; note = Description of Artificial Sequence: Synthetic oligonucleotide
aatgtaagtttaggtgctatc

SEQ ID NO: 27133 - RNA, 21 nt, synthetic construct
  source 1..21: mol_type = other RNA; note = Description of Artificial Sequence: Synthetic oligonucleotide
aaatgtaagtttaggtgctat

SEQ ID NO: 27134 - RNA, 21 nt, synthetic construct
  source 1..21: mol_type = other RNA; note = Description of Artificial Sequence: Synthetic oligonucleotide
taaatgtaagtttaggtgcta

SEQ ID NO: 27135 - RNA, 21 nt, synthetic construct
  source 1..21: mol_type = other RNA; note = Description of Artificial Sequence: Synthetic oligonucleotide
ttaaatgtaagtttaggtgct

SEQ ID NO: 27136 - RNA, 21 nt, synthetic construct
  source 1..21: mol_type = other RNA; note = Description of Artificial Sequence: Synthetic oligonucleotide
tttaaatgtaagtttaggtgc

SEQ ID NO: 27137 - RNA, 21 nt, synthetic construct
  source 1..21: mol_type = other RNA; note = Description of Artificial Sequence: Synthetic oligonucleotide
ttttaaatgtaagtttaggtg

SEQ ID NO: 27138 - RNA, 21 nt, synthetic construct
  source 1..21: mol_type = other RNA; note = Description of Artificial Sequence: Synthetic oligonucleotide
cttttaaatgtaagtttaggt

SEQ ID NO: 27139 - RNA, 21 nt, synthetic construct
  source 1..21: mol_type = other RNA; note = Description of Artificial Sequence: Synthetic oligonucleotide
tcttttaaatgtaagtttagg

SEQ ID NO: 27140 - RNA, 21 nt, synthetic construct
  source 1..21: mol_type = other RNA; note = Description of Artificial Sequence: Synthetic oligonucleotide
gtcttttaaatgtaagtttag

SEQ ID NO: 27141 - RNA, 21 nt, synthetic construct
  source 1..21: mol_type = other RNA; note = Description of Artificial Sequence: Synthetic oligonucleotide
tgtcttttaaatgtaagttta

SEQ ID NO: 27142 - RNA, 21 nt, synthetic construct
  source 1..21: mol_type = other RNA; note = Description of Artificial Sequence: Synthetic oligonucleotide
ctgtcttttaaatgtaagttt

SEQ ID NO: 27143 - RNA, 21 nt, synthetic construct
  source 1..21: mol_type = other RNA; note = Description of Artificial Sequence: Synthetic oligonucleotide
tctgtcttttaaatgtaagtt

SEQ ID NO: 27144 - RNA, 21 nt, synthetic construct
  source 1..21: mol_type = other RNA; note = Description of Artificial Sequence: Synthetic oligonucleotide
gtctgtcttttaaatgtaagt

SEQ ID NO: 27145 - RNA, 21 nt, synthetic construct
  source 1..21: mol_type = other RNA; note = Description of Artificial Sequence: Synthetic oligonucleotide
tgtctgtcttttaaatgtaag

SEQ ID NO: 27146 - RNA, 21 nt, synthetic construct
  source 1..21: mol_type = other RNA; note = Description of Artificial Sequence: Synthetic oligonucleotide
atgtctgtcttttaaatgtaa

SEQ ID NO: 27147 - RNA, 21 nt, synthetic construct
  source 1..21: mol_type = other RNA; note = Description of Artificial Sequence: Synthetic oligonucleotide
aatgtctgtcttttaaatgta

SEQ ID NO: 27148 - RNA, 21 nt, synthetic construct
  source 1..21: mol_type = other RNA; note = Description of Artificial Sequence: Synthetic oligonucleotide
gaatgtctgtcttttaaatgt

SEQ ID NO: 27149 - RNA, 21 nt, synthetic construct
  source 1..21: mol_type = other RNA; note = Description of Artificial Sequence: Synthetic oligonucleotide
ggaatgtctgtcttttaaatg

SEQ ID NO: 27150 - RNA, 21 nt, synthetic construct
  source 1..21: mol_type = other RNA; note = Description of Artificial Sequence: Synthetic oligonucleotide
aggaatgtctgtcttttaaat

SEQ ID NO: 27151 - RNA, 21 nt, synthetic construct
  source 1..21: mol_type = other RNA; note = Description of Artificial Sequence: Synthetic oligonucleotide
aaggaatgtctgtcttttaaa

SEQ ID NO: 27152 - RNA, 21 nt, synthetic construct
  source 1..21: mol_type = other RNA; note = Description of Artificial Sequence: Synthetic oligonucleotide
gaaggaatgtctgtcttttaa

SEQ ID NO: 27153 - RNA, 21 nt, synthetic construct
  source 1..21: mol_type = other RNA; note = Description of Artificial Sequence: Synthetic oligonucleotide
agaaggaatgtctgtctttta

SEQ ID NO: 27154 - RNA, 21 nt, synthetic construct
  source 1..21: mol_type = other RNA; note = Description of Artificial Sequence: Synthetic oligonucleotide
tagaaggaatgtctgtctttt

SEQ ID NO: 27155 - RNA, 21 nt, synthetic construct
  source 1..21: mol_type = other RNA; note = Description of Artificial Sequence: Synthetic oligonucleotide
gtagaaggaatgtctgtcttt

SEQ ID NO: 27156 - RNA, 21 nt, synthetic construct
  source 1..21: mol_type = other RNA; note = Description of Artificial Sequence: Synthetic oligonucleotide
tgtagaaggaatgtctgtctt

SEQ ID NO: 27157 - RNA, 21 nt, synthetic construct
  source 1..21: mol_type = other RNA; note = Description of Artificial Sequence: Synthetic oligonucleotide
atgtagaaggaatgtctgtct

SEQ ID NO: 27158 - RNA, 21 nt, synthetic construct
  source 1..21: mol_type = other RNA; note = Description of Artificial Sequence: Synthetic oligonucleotide
catgtagaaggaatgtctgtc

SEQ ID NO: 27159 - RNA, 21 nt, synthetic construct
  source 1..21: mol_type = other RNA; note = Description of Artificial Sequence: Synthetic oligonucleotide
acatgtagaaggaatgtctgt

SEQ ID NO: 27160 - RNA, 21 nt, synthetic construct
  source 1..21: mol_type = other RNA; note = Description of Artificial Sequence: Synthetic oligonucleotide
tacatgtagaaggaatgtctg

SEQ ID NO: 27161 - RNA, 21 nt, synthetic construct
  source 1..21: mol_type = other RNA; note = Description of Artificial Sequence: Synthetic oligonucleotide
ttacatgtagaaggaatgtct

SEQ ID NO: 27162 - RNA, 21 nt, synthetic construct
  source 1..21: mol_type = other RNA; note = Description of Artificial Sequence: Synthetic oligonucleotide
attacatgtagaaggaatgtc

SEQ ID NO: 27163 - RNA, 21 nt, synthetic construct
  source 1..21: mol_type = other RNA; note = Description of Artificial Sequence: Synthetic oligonucleotide
cattacatgtagaaggaatgt

SEQ ID NO: 27164 - RNA, 21 nt, synthetic construct
  source 1..21: mol_type = other RNA; note = Description of Artificial Sequence: Synthetic oligonucleotide
tcattacatgtagaaggaatg

SEQ ID NO: 27165 - RNA, 21 nt, synthetic construct
  source 1..21: mol_type = other RNA; note = Description of Artificial Sequence: Synthetic oligonucleotide
gtcattacatgtagaaggaat

SEQ ID NO: 27166 - RNA, 21 nt, synthetic construct
  source 1..21: mol_type = other RNA; note = Description of Artificial Sequence: Synthetic oligonucleotide
tgtcattacatgtagaaggaa

SEQ ID NO: 27167 - RNA, 21 nt, synthetic construct
  source 1..21: mol_type = other RNA; note = Description of Artificial Sequence: Synthetic oligonucleotide
gtgtcattacatgtagaagga

SEQ ID NO: 27168 - RNA, 21 nt, synthetic construct
  source 1..21: mol_type = other RNA; note = Description of Artificial Sequence: Synthetic oligonucleotide
agtgtcattacatgtagaagg

SEQ ID NO: 27169 - RNA, 21 nt, synthetic construct
  source 1..21: mol_type = other RNA; note = Description of Artificial Sequence: Synthetic oligonucleotide
aagtgtcattacatgtagaag

SEQ ID NO: 27170 - RNA, 21 nt, synthetic construct
  source 1..21: mol_type = other RNA; note = Description of Artificial Sequence: Synthetic oligonucleotide
gaagtgtcattacatgtagaa

SEQ ID NO: 27171 - RNA, 21 nt, synthetic construct
  source 1..21: mol_type = other RNA; note = Description of Artificial Sequence: Synthetic oligonucleotide
agaagtgtcattacatgtaga

SEQ ID NO: 27172 - RNA, 21 nt, synthetic construct
  source 1..21: mol_type = other RNA; note = Description of Artificial Sequence: Synthetic oligonucleotide
aagaagtgtcattacatgtag

SEQ ID NO: 27173 - RNA, 21 nt, synthetic construct
  source 1..21: mol_type = other RNA; note = Description of Artificial Sequence: Synthetic oligonucleotide
caagaagtgtcattacatgta

SEQ ID NO: 27174 - RNA, 21 nt, synthetic construct
  source 1..21: mol_type = other RNA; note = Description of Artificial Sequence: Synthetic oligonucleotide
acaagaagtgtcattacatgt

SEQ ID NO: 27175 - RNA, 21 nt, synthetic construct
  source 1..21: mol_type = other RNA; note = Description of Artificial Sequence: Synthetic oligonucleotide
cacaagaagtgtcattacatg

SEQ ID NO: 27176 - RNA, 21 nt, synthetic construct
  source 1..21: mol_type = other RNA; note = Description of Artificial Sequence: Synthetic oligonucleotide
acacaagaagtgtcattacat

SEQ ID NO: 27177 - RNA, 21 nt, synthetic construct
  source 1..21: mol_type = other RNA; note = Description of Artificial Sequence: Synthetic oligonucleotide
aacacaagaagtgtcattaca

SEQ ID NO: 27178 - RNA, 21 nt, synthetic construct
  source 1..21: mol_type = other RNA; note = Description of Artificial Sequence: Synthetic oligonucleotide
taacacaagaagtgtcattac

SEQ ID NO: 27179 - RNA, 21 nt, synthetic construct
  source 1..21: mol_type = other RNA; note = Description of Artificial Sequence: Synthetic oligonucleotide
ttaacacaagaagtgtcatta

SEQ ID NO: 27180 - RNA, 21 nt, synthetic construct
  source 1..21: mol_type = other RNA; note = Description of Artificial Sequence: Synthetic oligonucleotide
tttaacacaagaagtgtcatt

SEQ ID NO: 27181 - RNA, 21 nt, synthetic construct
  source 1..21: mol_type = other RNA; note = Description of Artificial Sequence: Synthetic oligonucleotide
gtttaacacaagaagtgtcat

SEQ ID NO: 27182 - RNA, 21 nt, synthetic construct
  source 1..21: mol_type = other RNA; note = Description of Artificial Sequence: Synthetic oligonucleotide
agtttaacacaagaagtgtca

SEQ ID NO: 27183 - RNA, 21 nt, synthetic construct
  source 1..21: mol_type = other RNA; note = Description of Artificial Sequence: Synthetic oligonucleotide
tagtttaacacaagaagtgtc

SEQ ID NO: 27184 - RNA, 21 nt, synthetic construct
  source 1..21: mol_type = other RNA; note = Description of Artificial Sequence: Synthetic oligonucleotide
ttagtttaacacaagaagtgt

SEQ ID NO: 27185 - RNA, 21 nt, synthetic construct
  source 1..21: mol_type = other RNA; note = Description of Artificial Sequence: Synthetic oligonucleotide
tttagtttaacacaagaagtg

SEQ ID NO: 27186 - RNA, 21 nt, synthetic construct
  source 1..21: mol_type = other RNA; note = Description of Artificial Sequence: Synthetic oligonucleotide
ttttagtttaacacaagaagt

SEQ ID NO: 27187 - RNA, 21 nt, synthetic construct
  source 1..21: mol_type = other RNA; note = Description of Artificial Sequence: Synthetic oligonucleotide
tttttagtttaacacaagaag

SEQ ID NO: 27188 - RNA, 21 nt, synthetic construct
  source 1..21: mol_type = other RNA; note = Description of Artificial Sequence: Synthetic oligonucleotide
atttttagtttaacacaagaa

SEQ ID NO: 27189 - RNA, 21 nt, synthetic construct
  source 1..21: mol_type = other RNA; note = Description of Artificial Sequence: Synthetic oligonucleotide
aatttttagtttaacacaaga

SEQ ID NO: 27190 - RNA, 21 nt, synthetic construct
  source 1..21: mol_type = other RNA; note = Description of Artificial Sequence: Synthetic oligonucleotide
aaatttttagtttaacacaag

SEQ ID NO: 27191 - RNA, 21 nt, synthetic construct
  source 1..21: mol_type = other RNA; note = Description of Artificial Sequence: Synthetic oligonucleotide
taaatttttagtttaacacaa

SEQ ID NO: 27192 - RNA, 21 nt, synthetic construct
  source 1..21: mol_type = other RNA; note = Description of Artificial Sequence: Synthetic oligonucleotide
gtaaatttttagtttaacaca

SEQ ID NO: 27193 - RNA, 21 nt, synthetic construct
  source 1..21: mol_type = other RNA; note = Description of Artificial Sequence: Synthetic oligonucleotide
tgtaaatttttagtttaacac

SEQ ID NO: 27194 - RNA, 21 nt, synthetic construct
  source 1..21: mol_type = other RNA; note = Description of Artificial Sequence: Synthetic oligonucleotide
ttgtaaatttttagtttaaca

SEQ ID NO: 27195 - RNA, 21 nt, synthetic construct
  source 1..21: mol_type = other RNA; note = Description of Artificial Sequence: Synthetic oligonucleotide
cttgtaaatttttagtttaac

SEQ ID NO: 27196 - RNA, 21 nt, synthetic construct
  source 1..21: mol_type = other RNA; note = Description of Artificial Sequence: Synthetic oligonucleotide
tcttgtaaatttttagtttaa

SEQ ID NO: 27197 - RNA, 21 nt, synthetic construct
  source 1..21: mol_type = other RNA; note = Description of Artificial Sequence: Synthetic oligonucleotide
ctcttgtaaatttttagttta

SEQ ID NO: 27198 - RNA, 21 nt, synthetic construct
  source 1..21: mol_type = other RNA; note = Description of Artificial Sequence: Synthetic oligonucleotide
tctcttgtaaatttttagttt

SEQ ID NO: 27199 - RNA, 21 nt, synthetic construct
  source 1..21: mol_type = other RNA; note = Description of Artificial Sequence: Synthetic oligonucleotide
ttctcttgtaaatttttagtt

SEQ ID NO: 27200 - RNA, 21 nt, synthetic construct
  source 1..21: mol_type = other RNA; note = Description of Artificial Sequence: Synthetic oligonucleotide
cttctcttgtaaatttttagt

SEQ ID NO: 27201 - RNA, 21 nt, synthetic construct
  source 1..21: mol_type = other RNA; note = Description of Artificial Sequence: Synthetic oligonucleotide
tcttctcttgtaaatttttag

SEQ ID NO: 27202 - RNA, 21 nt, synthetic construct
  source 1..21: mol_type = other RNA; note = Description of Artificial Sequence: Synthetic oligonucleotide
ttcttctcttgtaaattttta

SEQ ID NO: 27203 - RNA, 21 nt, synthetic construct
  source 1..21: mol_type = other RNA; note = Description of Artificial Sequence: Synthetic oligonucleotide
tttcttctcttgtaaattttt

SEQ ID NO: 27204 - RNA, 21 nt, synthetic construct
  source 1..21: mol_type = other RNA; note = Description of Artificial Sequence: Synthetic oligonucleotide
ctttcttctcttgtaaatttt

SEQ ID NO: 27205 - RNA, 21 nt, synthetic construct
  source 1..21: mol_type = other RNA; note = Description of Artificial Sequence: Synthetic oligonucleotide
actttcttctcttgtaaattt

SEQ ID NO: 27206 - RNA, 21 nt, synthetic construct
  source 1..21: mol_type = other RNA; note = Description of Artificial Sequence: Synthetic oligonucleotide
cactttcttctcttgtaaatt

SEQ ID NO: 27207 - RNA, 21 nt, synthetic construct
  source 1..21: mol_type = other RNA; note = Description of Artificial Sequence: Synthetic oligonucleotide
tcactttcttctcttgtaaat

SEQ ID NO: 27208 - RNA, 21 nt, synthetic construct
  source 1..21: mol_type = other RNA; note = Description of Artificial Sequence: Synthetic oligonucleotide
ttcactttcttctcttgtaaa

SEQ ID NO: 27209 - RNA, 21 nt, synthetic construct
  source 1..21: mol_type = other RNA; note = Description of Artificial Sequence: Synthetic oligonucleotide
tttcactttcttctcttgtaa

SEQ ID NO: 27210 - RNA, 21 nt, synthetic construct
  source 1..21: mol_type = other RNA; note = Description of Artificial Sequence: Synthetic oligonucleotide
ctttcactttcttctcttgta

SEQ ID NO: 27211 - RNA, 21 nt, synthetic construct
  source 1..21: mol_type = other RNA; note = Description of Artificial Sequence: Synthetic oligonucleotide
gctttcactttcttctcttgt

SEQ ID NO: 27212 - RNA, 21 nt, synthetic construct
  source 1..21: mol_type = other RNA; note = Description of Artificial Sequence: Synthetic oligonucleotide
tgctttcactttcttctcttg

SEQ ID NO: 27213 - RNA, 21 nt, synthetic construct
  source 1..21: mol_type = other RNA; note = Description of Artificial Sequence: Synthetic oligonucleotide
ttgctttcactttcttctctt

SEQ ID NO: 27214 - RNA, 21 nt, synthetic construct
  source 1..21: mol_type = other RNA; note = Description of Artificial Sequence: Synthetic oligonucleotide
tttgctttcactttcttctct

SEQ ID NO: 27215 - RNA, 21 nt, synthetic construct
  source 1..21: mol_type = other RNA; note = Description of Artificial Sequence: Synthetic oligonucleotide
atttgctttcactttcttctc

SEQ ID NO: 27216 - RNA, 21 nt, synthetic construct
  source 1..21: mol_type = other RNA; note = Description of Artificial Sequence: Synthetic oligonucleotide
catttgctttcactttcttct

SEQ ID NO: 27217 - RNA, 21 nt, synthetic construct
  source 1..21: mol_type = other RNA; note = Description of Artificial Sequence: Synthetic oligonucleotide
ccatttgctttcactttcttc

SEQ ID NO: 27218 - RNA, 21 nt, synthetic construct
  source 1..21: mol_type = other RNA; note = Description of Artificial Sequence: Synthetic oligonucleotide
cccatttgctttcactttctt

SEQ ID NO: 27219 - RNA, 21 nt, synthetic construct
  source 1..21: mol_type = other RNA; note = Description of Artificial Sequence: Synthetic oligonucleotide
ccccatttgctttcactttct

SEQ ID NO: 27220 - RNA, 21 nt, synthetic construct
  source 1..21: mol_type = other RNA; note = Description of Artificial Sequence: Synthetic oligonucleotide
accccatttgctttcactttc

SEQ ID NO: 27221 - RNA, 21 nt, synthetic construct
  source 1..21: mol_type = other RNA; note = Description of Artificial Sequence: Synthetic oligonucleotide
aaccccatttgctttcacttt

SEQ ID NO: 27222 - RNA, 21 nt, synthetic construct
  source 1..21: mol_type = other RNA; note = Description of Artificial Sequence: Synthetic oligonucleotide
aaaccccatttgctttcactt

SEQ ID NO: 27223 - RNA, 21 nt, synthetic construct
  source 1..21: mol_type = other RNA; note = Description of Artificial Sequence: Synthetic oligonucleotide
gaaaccccatttgctttcact

SEQ ID NO: 27224 - RNA, 21 nt, synthetic construct
  source 1..21: mol_type = other RNA; note = Description of Artificial Sequence: Synthetic oligonucleotide
tgaaaccccatttgctttcac

SEQ ID NO: 27225 - RNA, 21 nt, synthetic construct
  source 1..21: mol_type = other RNA; note = Description of Artificial Sequence: Synthetic oligonucleotide
gtgaaaccccatttgctttca

SEQ ID NO: 27226 - RNA, 21 nt, synthetic construct
  source 1..21: mol_type = other RNA; note = Description of Artificial Sequence: Synthetic oligonucleotide
tgtgaaaccccatttgctttc

SEQ ID NO: 27227 - RNA, 21 nt, synthetic construct
  source 1..21: mol_type = other RNA; note = Description of Artificial Sequence: Synthetic oligonucleotide
ttgtgaaaccccatttgcttt

SEQ ID NO: 27228 - RNA, 21 nt, synthetic construct
  source 1..21: mol_type = other RNA; note = Description of Artificial Sequence: Synthetic oligonucleotide
tttgtgaaaccccatttgctt

SEQ ID NO: 27229 - RNA, 21 nt, synthetic construct
  source 1..21: mol_type = other RNA; note = Description of Artificial Sequence: Synthetic oligonucleotide
atttgtgaaaccccatttgct

SEQ ID NO: 27230 - RNA, 21 nt, synthetic construct
  source 1..21: mol_type = other RNA; note = Description of Artificial Sequence: Synthetic oligonucleotide
tatttgtgaaaccccatttgc

SEQ ID NO: 27231 - RNA, 21 nt, synthetic construct
  source 1..21: mol_type = other RNA; note = Description of Artificial Sequence: Synthetic oligonucleotide
ctatttgtgaaaccccatttg

SEQ ID NO: 27232 - RNA, 21 nt, synthetic construct
  source 1..21: mol_type = other RNA; note = Description of Artificial Sequence: Synthetic oligonucleotide
actatttgtgaaaccccattt

SEQ ID NO: 27233 - RNA, 21 nt, synthetic construct
  source 1..21: mol_type = other RNA; note = Description of Artificial Sequence: Synthetic oligonucleotide
aactatttgtgaaaccccatt

SEQ ID NO: 27234 - RNA, 21 nt, synthetic construct
  source 1..21: mol_type = other RNA; note = Description of Artificial Sequence: Synthetic oligonucleotide
caactatttgtgaaaccccat

SEQ ID NO: 27235 - RNA, 21 nt, synthetic construct
  source 1..21: mol_type = other RNA; note = Description of Artificial Sequence: Synthetic oligonucleotide
acaactatttgtgaaacccca

SEQ ID NO: 27236 - RNA, 21 nt, synthetic construct
  source 1..21: mol_type = other RNA; note = Description of Artificial Sequence: Synthetic oligonucleotide
tacaactatttgtgaaacccc

SEQ ID NO: 27237 - RNA, 21 nt, synthetic construct
  source 1..21: mol_type = other RNA; note = Description of Artificial Sequence: Synthetic oligonucleotide
ttacaactatttgtgaaaccc

SEQ ID NO: 27238 - RNA, 21 nt, synthetic construct
  source 1..21: mol_type = other RNA; note = Description of Artificial Sequence: Synthetic oligonucleotide
tttacaactatttgtgaaacc

SEQ ID NO: 27239 - RNA, 21 nt, synthetic construct
  source 1..21: mol_type = other RNA; note = Description of Artificial Sequence: Synthetic oligonucleotide
atttacaactatttgtgaaac

SEQ ID NO: 27240 - RNA, 21 nt, synthetic construct
  source 1..21: mol_type = other RNA; note = Description of Artificial Sequence: Synthetic oligonucleotide
tatttacaactatttgtgaaa

SEQ ID NO: 27241 - RNA, 21 nt, synthetic construct
  source 1..21: mol_type = other RNA; note = Description of Artificial Sequence: Synthetic oligonucleotide
atatttacaactatttgtgaa

SEQ ID NO: 27242 - RNA, 21 nt, synthetic construct
  source 1..21: mol_type = other RNA; note = Description of Artificial Sequence: Synthetic oligonucleotide
tatatttacaactatttgtga

SEQ ID NO: 27243 - RNA, 21 nt, synthetic construct
  source 1..21: mol_type = other RNA; note = Description of Artificial Sequence: Synthetic oligonucleotide
ctatatttacaactatttgtg

SEQ ID NO: 27244 - RNA, 21 nt, synthetic construct
  source 1..21: mol_type = other RNA; note = Description of Artificial Sequence: Synthetic oligonucleotide
actatatttacaactatttgt

SEQ ID NO: 27245 - RNA, 21 nt, synthetic construct
  source 1..21: mol_type = other RNA; note = Description of Artificial Sequence: Synthetic oligonucleotide
cactatatttacaactatttg

SEQ ID NO: 27246 - RNA, 21 nt, synthetic construct
  source 1..21: mol_type = other RNA; note = Description of Artificial Sequence: Synthetic oligonucleotide
tcactatatttacaactattt

SEQ ID NO: 27247 - RNA, 21 nt, synthetic construct
  source 1..21: mol_type = other RNA; note = Description of Artificial Sequence: Synthetic oligonucleotide
ttcactatatttacaactatt

SEQ ID NO: 27248 - RNA, 21 nt, synthetic construct
  source 1..21: mol_type = other RNA; note = Description of Artificial Sequence: Synthetic oligonucleotide
cttcactatatttacaactat

SEQ ID NO: 27249 - RNA, 21 nt, synthetic construct
  source 1..21: mol_type = other RNA; note = Description of Artificial Sequence: Synthetic oligonucleotide
gcttcactatatttacaacta

SEQ ID NO: 27250 - RNA, 21 nt, synthetic construct
  source 1..21: mol_type = other RNA; note = Description of Artificial Sequence: Synthetic oligonucleotide
tgcttcactatatttacaact

SEQ ID NO: 27251 - RNA, 21 nt, synthetic construct
  source 1..21: mol_type = other RNA; note = Description of Artificial Sequence: Synthetic oligonucleotide
ttgcttcactatatttacaac

SEQ ID NO: 27252 - RNA, 21 nt, synthetic construct
  source 1..21: mol_type = other RNA; note = Description of Artificial Sequence: Synthetic oligonucleotide
attgcttcactatatttacaa

SEQ ID NO: 27253 - RNA, 21 nt, synthetic construct
  source 1..21: mol_type = other RNA; note = Description of Artificial Sequence: Synthetic oligonucleotide
aattgcttcactatatttaca

SEQ ID NO: 27254 - RNA, 21 nt, synthetic construct
  source 1..21: mol_type = other RNA; note = Description of Artificial Sequence: Synthetic oligonucleotide
aaattgcttcactatatttac

SEQ ID NO: 27255 - RNA, 21 nt, synthetic construct
  source 1..21: mol_type = other RNA; note = Description of Artificial Sequence: Synthetic oligonucleotide
caaattgcttcactatattta

SEQ ID NO: 27256 - RNA, 21 nt, synthetic construct
  source 1..21: mol_type = other RNA; note = Description of Artificial Sequence: Synthetic oligonucleotide
tcaaattgcttcactatattt

SEQ ID NO: 27257 - RNA, 21 nt, synthetic construct
  source 1..21: mol_type = other RNA; note = Description of Artificial Sequence: Synthetic oligonucleotide
ttcaaattgcttcactatatt

SEQ ID NO: 27258 - RNA, 21 nt, synthetic construct
  source 1..21: mol_type = other RNA; note = Description of Artificial Sequence: Synthetic oligonucleotide
tttcaaattgcttcactatat

SEQ ID NO: 27259 - RNA, 21 nt, synthetic construct
  source 1..21: mol_type = other RNA; note = Description of Artificial Sequence: Synthetic oligonucleotide
atttcaaattgcttcactata

SEQ ID NO: 27260 - RNA, 21 nt, synthetic construct
  source 1..21: mol_type = other RNA; note = Description of Artificial Sequence: Synthetic oligonucleotide
tatttcaaattgcttcactat

SEQ ID NO: 27261 - RNA, 21 nt, synthetic construct
  source 1..21: mol_type = other RNA; note = Description of Artificial Sequence: Synthetic oligonucleotide
ttatttcaaattgcttcacta

SEQ ID NO: 27262 - RNA, 21 nt, synthetic construct
  source 1..21: mol_type = other RNA; note = Description of Artificial Sequence: Synthetic oligonucleotide
attatttcaaattgcttcact

SEQ ID NO: 27263 - RNA, 21 nt, synthetic construct
  source 1..21: mol_type = other RNA; note = Description of Artificial Sequence: Synthetic oligonucleotide
aattatttcaaattgcttcac

SEQ ID NO: 27264 - RNA, 21 nt, synthetic construct
  source 1..21: mol_type = other RNA; note = Description of Artificial Sequence: Synthetic oligonucleotide
aaattatttcaaattgcttca

SEQ ID NO: 27265 - RNA, 21 nt, synthetic construct
  source 1..21: mol_type = other RNA; note = Description of Artificial Sequence: Synthetic oligonucleotide
aaaattatttcaaattgcttc

SEQ ID NO: 27266 - RNA, 21 nt, synthetic construct
  source 1..21: mol_type = other RNA; note = Description of Artificial Sequence: Synthetic oligonucleotide
gaaaattatttcaaattgctt

SEQ ID NO: 27267 - RNA, 21 nt, synthetic construct
  source 1..21: mol_type = other RNA; note = Description of Artificial Sequence: Synthetic oligonucleotide
tgaaaattatttcaaattgct

SEQ ID NO: 27268 - RNA, 21 nt, synthetic construct
  source 1..21: mol_type = other RNA; note = Description of Artificial Sequence: Synthetic oligonucleotide
ttgaaaattatttcaaattgc

SEQ ID NO: 27269 - RNA, 21 nt, synthetic construct
  source 1..21: mol_type = other RNA; note = Description of Artificial Sequence: Synthetic oligonucleotide
cttgaaaattatttcaaattg

SEQ ID NO: 27270 - RNA, 21 nt, synthetic construct
  source 1..21: mol_type = other RNA; note = Description of Artificial Sequence: Synthetic oligonucleotide
gcttgaaaattatttcaaatt

SEQ ID NO: 27271 - RNA, 21 nt, synthetic construct
  source 1..21: mol_type = other RNA; note = Description of Artificial Sequence: Synthetic oligonucleotide
tgcttgaaaattatttcaaat

SEQ ID NO: 27272 - RNA, 21 nt, synthetic construct
  source 1..21: mol_type = other RNA; note = Description of Artificial Sequence: Synthetic oligonucleotide
ttgcttgaaaattatttcaaa

SEQ ID NO: 27273 - RNA, 21 nt, synthetic construct
  source 1..21: mol_type = other RNA; note = Description of Artificial Sequence: Synthetic oligonucleotide
tttgcttgaaaattatttcaa

SEQ ID NO: 27274 - RNA, 21 nt, synthetic construct
  source 1..21: mol_type = other RNA; note = Description of Artificial Sequence: Synthetic oligonucleotide
ctttgcttgaaaattatttca

SEQ ID NO: 27275 - RNA, 21 nt, synthetic construct
  source 1..21: mol_type = other RNA; note = Description of Artificial Sequence: Synthetic oligonucleotide
actttgcttgaaaattatttc

SEQ ID NO: 27276 - RNA, 21 nt, synthetic construct
  source 1..21: mol_type = other RNA; note = Description of Artificial Sequence: Synthetic oligonucleotide
tactttgcttgaaaattattt

SEQ ID NO: 27277 - RNA, 21 nt, synthetic construct
  source 1..21: mol_type = other RNA; note = Description of Artificial Sequence: Synthetic oligonucleotide
atactttgcttgaaaattatt

SEQ ID NO: 27278 - RNA, 21 nt, synthetic construct
  source 1..21: mol_type = other RNA; note = Description of Artificial Sequence: Synthetic oligonucleotide
aatactttgcttgaaaattat

SEQ ID NO: 27279 - RNA, 21 nt, synthetic construct
  source 1..21: mol_type = other RNA; note = Description of Artificial Sequence: Synthetic oligonucleotide
caatactttgcttgaaaatta

SEQ ID NO: 27280 - RNA, 21 nt, synthetic construct
  source 1..21: mol_type = other RNA; note = Description of Artificial Sequence: Synthetic oligonucleotide
acaatactttgcttgaaaatt

SEQ ID NO: 27281 - RNA, 21 nt, synthetic construct
  source 1..21: mol_type = other RNA; note = Description of Artificial Sequence: Synthetic oligonucleotide
cacaatactttgcttgaaaat

SEQ ID NO: 27282 - RNA, 21 nt, synthetic construct
  source 1..21: mol_type = other RNA; note = Description of Artificial Sequence: Synthetic oligonucleotide
tcacaatactttgcttgaaaa

SEQ ID NO: 27283 - RNA, 21 nt, synthetic construct
  source 1..21: mol_type = other RNA; note = Description of Artificial Sequence: Synthetic oligonucleotide
ttcacaatactttgcttgaaa

SEQ ID NO: 27284 - RNA, 21 nt, synthetic construct
  source 1..21: mol_type = other RNA; note = Description of Artificial Sequence: Synthetic oligonucleotide
tttcacaatactttgcttgaa

SEQ ID NO: 27285 - RNA, 21 nt, synthetic construct
  source 1..21: mol_type = other RNA; note = Description of Artificial Sequence: Synthetic oligonucleotide
ctttcacaatactttgcttga

SEQ ID NO: 27286 - RNA, 21 nt, synthetic construct
  source 1..21: mol_type = other RNA; note = Description of Artificial Sequence: Synthetic oligonucleotide
actttcacaatactttgcttg

SEQ ID NO: 27287 - RNA, 21 nt, synthetic construct
  source 1..21: mol_type = other RNA; note = Description of Artificial Sequence: Synthetic oligonucleotide
tactttcacaatactttgctt

SEQ ID NO: 27288 - RNA, 21 nt, synthetic construct
  source 1..21: mol_type = other RNA; note = Description of Artificial Sequence: Synthetic oligonucleotide
atactttcacaatactttgct

SEQ ID NO: 27289 - RNA, 21 nt, synthetic construct
  source 1..21: mol_type = other RNA; note = Description of Artificial Sequence: Synthetic oligonucleotide
aatactttcacaatactttgc

SEQ ID NO: 27290 - RNA, 21 nt, synthetic construct
  source 1..21: mol_type = other RNA; note = Description of Artificial Sequence: Synthetic oligonucleotide
gaatactttcacaatactttg

SEQ ID NO: 27291 - RNA, 21 nt, synthetic construct
  source 1..21: mol_type = other RNA; note = Description of Artificial Sequence: Synthetic oligonucleotide
agaatactttcacaatacttt

SEQ ID NO: 27292 - RNA, 21 nt, synthetic construct
  source 1..21: mol_type = other RNA; note = Description of Artificial Sequence: Synthetic oligonucleotide
tagaatactttcacaatactt

SEQ ID NO: 27293 - RNA, 21 nt, synthetic construct
  source 1..21: mol_type = other RNA; note = Description of Artificial Sequence: Synthetic oligonucleotide
ttagaatactttcacaatact

SEQ ID NO: 27294 - RNA, 21 nt, synthetic construct
  source 1..21: mol_type = other RNA; note = Description of Artificial Sequence: Synthetic oligonucleotide
cttagaatactttcacaatac

SEQ ID NO: 27295 - RNA, 21 nt, synthetic construct
  source 1..21: mol_type = other RNA; note = Description of Artificial Sequence: Synthetic oligonucleotide
gcttagaatactttcacaata

SEQ ID NO: 27296 - RNA, 21 nt, synthetic construct
  source 1..21: mol_type = other RNA; note = Description of Artificial Sequence: Synthetic oligonucleotide
ggcttagaatactttcacaat

SEQ ID NO: 27297 - RNA, 21 nt, synthetic construct
  source 1..21: mol_type = other RNA; note = Description of Artificial Sequence: Synthetic oligonucleotide
tggcttagaatactttcacaa

SEQ ID NO: 27298 - RNA, 21 nt, synthetic construct
  source 1..21: mol_type = other RNA; note = Description of Artificial Sequence: Synthetic oligonucleotide
ttggcttagaatactttcaca

SEQ ID NO: 27299 - RNA, 21 nt, synthetic construct
  source 1..21: mol_type = other RNA; note = Description of Artificial Sequence: Synthetic oligonucleotide
cttggcttagaatactttcac

SEQ ID NO: 27300 - RNA, 21 nt, synthetic construct
  source 1..21: mol_type = other RNA; note = Description of Artificial Sequence: Synthetic oligonucleotide
acttggcttagaatactttca

SEQ ID NO: 27301 - RNA, 21 nt, synthetic construct
  source 1..21: mol_type = other RNA; note = Description of Artificial Sequence: Synthetic oligonucleotide
aacttggcttagaatactttc

SEQ ID NO: 27302 - RNA, 21 nt, synthetic construct
  source 1..21: mol_type = other RNA; note = Description of Artificial Sequence: Synthetic oligonucleotide
aaacttggcttagaatacttt

SEQ ID NO: 27303 - RNA, 21 nt, synthetic construct
  source 1..21: mol_type = other RNA; note = Description of Artificial Sequence: Synthetic oligonucleotide
aaaacttggcttagaatactt

SEQ ID NO: 27304 - RNA, 21 nt, synthetic construct
  source 1..21: mol_type = other RNA; note = Description of Artificial Sequence: Synthetic oligonucleotide
taaaacttggcttagaatact

SEQ ID NO: 27305 - RNA, 21 nt, synthetic construct
  source 1..21: mol_type = other RNA; note = Description of Artificial Sequence: Synthetic oligonucleotide
ttaaaacttggcttagaatac

SEQ ID NO: 27306 - RNA, 21 nt, synthetic construct
  source 1..21: mol_type = other RNA; note = Description of Artificial Sequence: Synthetic oligonucleotide
tttaaaacttggcttagaata

SEQ ID NO: 27307 - RNA, 21 nt, synthetic construct
  source 1..21: mol_type = other RNA; note = Description of Artificial Sequence: Synthetic oligonucleotide
atttaaaacttggcttagaat

SEQ ID NO: 27308 - RNA, 21 nt, synthetic construct
  source 1..21: mol_type = other RNA; note = Description of Artificial Sequence: Synthetic oligonucleotide
tatttaaaacttggcttagaa

SEQ ID NO: 27309 - RNA, 21 nt, synthetic construct
  source 1..21: mol_type = other RNA; note = Description of Artificial Sequence: Synthetic oligonucleotide
atatttaaaacttggcttaga

SEQ ID NO: 27310 - RNA, 21 nt, synthetic construct
  source 1..21: mol_type = other RNA; note = Description of Artificial Sequence: Synthetic oligonucleotide
aatatttaaaacttggcttag

SEQ ID NO: 27311 - RNA, 21 nt, synthetic construct
  source 1..21: mol_type = other RNA; note = Description of Artificial Sequence: Synthetic oligonucleotide
taatatttaaaacttggctta

SEQ ID NO: 27312 - RNA, 21 nt, synthetic construct
  source 1..21: mol_type = other RNA; note = Description of Artificial Sequence: Synthetic oligonucleotide
ataatatttaaaacttggctt

SEQ ID NO: 27313 - RNA, 21 nt, synthetic construct
  source 1..21: mol_type = other RNA; note = Description of Artificial Sequence: Synthetic oligonucleotide
gataatatttaaaacttggct

SEQ ID NO: 27314 - RNA, 21 nt, synthetic construct
  source 1..21: mol_type = other RNA; note = Description of Artificial Sequence: Synthetic oligonucleotide
agataatatttaaaacttggc

SEQ ID NO: 27315 - RNA, 21 nt, synthetic construct
  source 1..21: mol_type = other RNA; note = Description of Artificial Sequence: Synthetic oligonucleotide
tagataatatttaaaacttgg

SEQ ID NO: 27316 - RNA, 21 nt, synthetic construct
  source 1..21: mol_type = other RNA; note = Description of Artificial Sequence: Synthetic oligonucleotide
ttagataatatttaaaacttg

SEQ ID NO: 27317 - RNA, 21 nt, synthetic construct
  source 1..21: mol_type = other RNA; note = Description of Artificial Sequence: Synthetic oligonucleotide
gttagataatatttaaaactt

SEQ ID NO: 27318 - RNA, 21 nt, synthetic construct
  source 1..21: mol_type = other RNA; note = Description of Artificial Sequence: Synthetic oligonucleotide
tgttagataatatttaaaact

SEQ ID NO: 27319 - RNA, 21 nt, synthetic construct
  source 1..21: mol_type = other RNA; note = Description of Artificial Sequence: Synthetic oligonucleotide
ctgttagataatatttaaaac

SEQ ID NO: 27320 - RNA, 21 nt, synthetic construct
  source 1..21: mol_type = other RNA; note = Description of Artificial Sequence: Synthetic oligonucleotide
tctgttagataatatttaaaa

SEQ ID NO: 27321 - RNA, 21 nt, synthetic construct
  source 1..21: mol_type = other RNA; note = Description of Artificial Sequence: Synthetic oligonucleotide
gtctgttagataatatttaaa

SEQ ID NO: 27322 - RNA, 21 nt, synthetic construct
  source 1..21: mol_type = other RNA; note = Description of Artificial Sequence: Synthetic oligonucleotide
tgtctgttagataatatttaa

SEQ ID NO: 27323 - RNA, 21 nt, synthetic construct
  source 1..21: mol_type = other RNA; note = Description of Artificial Sequence: Synthetic oligonucleotide
ttgtctgttagataatattta

SEQ ID NO: 27324 - RNA, 21 nt, synthetic construct
  source 1..21: mol_type = other RNA; note = Description of Artificial Sequence: Synthetic oligonucleotide
cttgtctgttagataatattt

SEQ ID NO: 27325 - RNA, 21 nt, synthetic construct
  source 1..21: mol_type = other RNA; note = Description of Artificial Sequence: Synthetic oligonucleotide
tcttgtctgttagataatatt

SEQ ID NO: 27326 - RNA, 21 nt, synthetic construct
  source 1..21: mol_type = other RNA; note = Description of Artificial Sequence: Synthetic oligonucleotide
ctcttgtctgttagataatat

SEQ ID NO: 27327 - RNA, 21 nt, synthetic construct
  source 1..21: mol_type = other RNA; note = Description of Artificial Sequence: Synthetic oligonucleotide
actcttgtctgttagataata

SEQ ID NO: 27328 - RNA, 21 nt, synthetic construct
  source 1..21: mol_type = other RNA; note = Description of Artificial Sequence: Synthetic oligonucleotide
cactcttgtctgttagataat

SEQ ID NO: 27329 - RNA, 21 nt, synthetic construct
  source 1..21: mol_type = other RNA; note = Description of Artificial Sequence: Synthetic oligonucleotide
ccactcttgtctgttagataa

SEQ ID NO: 27330 - RNA, 21 nt, synthetic construct
  source 1..21: mol_type = other RNA; note = Description of Artificial Sequence: Synthetic oligonucleotide
accactcttgtctgttagata

SEQ ID NO: 27331 - RNA, 21 nt, synthetic construct
  source 1..21: mol_type = other RNA; note = Description of Artificial Sequence: Synthetic oligonucleotide
taccactcttgtctgttagat

SEQ ID NO: 27332 - RNA, 21 nt, synthetic construct
  source 1..21: mol_type = other RNA; note = Description of Artificial Sequence: Synthetic oligonucleotide
ataccactcttgtctgttaga

SEQ ID NO: 27333 - RNA, 21 nt, synthetic construct
  source 1..21: mol_type = other RNA; note = Description of Artificial Sequence: Synthetic oligonucleotide
tataccactcttgtctgttag

SEQ ID NO: 27334 - RNA, 21 nt, synthetic construct
  source 1..21: mol_type = other RNA; note = Description of Artificial Sequence: Synthetic oligonucleotide
atataccactcttgtctgtta

SEQ ID NO: 27335 - RNA, 21 nt, synthetic construct
  source 1..21: mol_type = other RNA; note = Description of Artificial Sequence: Synthetic oligonucleotide
tatataccactcttgtctgtt

SEQ ID NO: 27336 - RNA, 21 nt, synthetic construct
  source 1..21: mol_type = other RNA; note = Description of Artificial Sequence: Synthetic oligonucleotide
gtatataccactcttgtctgt

SEQ ID NO: 27337 - RNA, 21 nt, synthetic construct
  source 1..21: mol_type = other RNA; note = Description of Artificial Sequence: Synthetic oligonucleotide
tgtatataccactcttgtctg

SEQ ID NO: 27338 - RNA, 21 nt, synthetic construct
  source 1..21: mol_type = other RNA; note = Description of Artificial Sequence: Synthetic oligonucleotide
ttgtatataccactcttgtct

SEQ ID NO: 27339 - RNA, 21 nt, synthetic construct
  source 1..21: mol_type = other RNA; note = Description of Artificial Sequence: Synthetic oligonucleotide
cttgtatataccactcttgtc

SEQ ID NO: 27340 - RNA, 21 nt, synthetic construct
  source 1..21: mol_type = other RNA; note = Description of Artificial Sequence: Synthetic oligonucleotide
acttgtatataccactcttgt

SEQ ID NO: 27341 - RNA, 21 nt, synthetic construct
  source 1..21: mol_type = other RNA; note = Description of Artificial Sequence: Synthetic oligonucleotide
tacttgtatataccactcttg

SEQ ID NO: 27342 - RNA, 21 nt, synthetic construct
  source 1..21: mol_type = other RNA; note = Description of Artificial Sequence: Synthetic oligonucleotide
ctacttgtatataccactctt

SEQ ID NO: 27343 - RNA, 21 nt, synthetic construct
  source 1..21: mol_type = other RNA; note = Description of Artificial Sequence: Synthetic oligonucleotide
tctacttgtatataccactct

SEQ ID NO: 27344 - RNA, 21 nt, synthetic construct
  source 1..21: mol_type = other RNA; note = Description of Artificial Sequence: Synthetic oligonucleotide
atctacttgtatataccactc

SEQ ID NO: 27345 - RNA, 21 nt, synthetic construct
  source 1..21: mol_type = other RNA; note = Description of Artificial Sequence: Synthetic oligonucleotide
gatctacttgtatataccact

SEQ ID NO: 27346 - RNA, 21 nt, synthetic construct
  source 1..21: mol_type = other RNA; note = Description of Artificial Sequence: Synthetic oligonucleotide
ggatctacttgtatataccac

SEQ ID NO: 27347 - RNA, 21 nt, synthetic construct
  source 1..21: mol_type = other RNA; note = Description of Artificial Sequence: Synthetic oligonucleotide
aggatctacttgtatatacca

SEQ ID NO: 27348 - RNA, 21 nt, synthetic construct
  source 1..21: mol_type = other RNA; note = Description of Artificial Sequence: Synthetic oligonucleotide
caggatctacttgtatatacc

SEQ ID NO: 27349 - RNA, 21 nt, synthetic construct
  source 1..21: mol_type = other RNA; note = Description of Artificial Sequence: Synthetic oligonucleotide
tcaggatctacttgtatatac

SEQ ID NO: 27350 - RNA, 21 nt, synthetic construct
  source 1..21: mol_type = other RNA; note = Description of Artificial Sequence: Synthetic oligonucleotide
ctcaggatctacttgtatata

SEQ ID NO: 27351 - RNA, 21 nt, synthetic construct
  source 1..21: mol_type = other RNA; note = Description of Artificial Sequence: Synthetic oligonucleotide
tctcaggatctacttgtatat

SEQ ID NO: 27352 - RNA, 21 nt, synthetic construct
  source 1..21: mol_type = other RNA; note = Description of Artificial Sequence: Synthetic oligonucleotide
ttctcaggatctacttgtata

SEQ ID NO: 27353 - RNA, 21 nt, synthetic construct
  source 1..21: mol_type = other RNA; note = Description of Artificial Sequence: Synthetic oligonucleotide
cttctcaggatctacttgtat

SEQ ID NO: 27354 - RNA, 21 nt, synthetic construct
  source 1..21: mol_type = other RNA; note = Description of Artificial Sequence: Synthetic oligonucleotide
acttctcaggatctacttgta

SEQ ID NO: 27355 - RNA, 21 nt, synthetic construct
  source 1..21: mol_type = other RNA; note = Description of Artificial Sequence: Synthetic oligonucleotide
tacttctcaggatctacttgt

SEQ ID NO: 27356 - RNA, 21 nt, synthetic construct
  source 1..21: mol_type = other RNA; note = Description of Artificial Sequence: Synthetic oligonucleotide
gtacttctcaggatctacttg

SEQ ID NO: 27357 - RNA, 21 nt, synthetic construct
  source 1..21: mol_type = other RNA; note = Description of Artificial Sequence: Synthetic oligonucleotide
ggtacttctcaggatctactt

SEQ ID NO: 27358 - RNA, 21 nt, synthetic construct
  source 1..21: mol_type = other RNA; note = Description of Artificial Sequence: Synthetic oligonucleotide
aggtacttctcaggatctact

SEQ ID NO: 27359 - RNA, 21 nt, synthetic construct
  source 1..21: mol_type = other RNA; note = Description of Artificial Sequence: Synthetic oligonucleotide
aaggtacttctcaggatctac

SEQ ID NO: 27360 - RNA, 21 nt, synthetic construct
  source 1..21: mol_type = other RNA; note = Description of Artificial Sequence: Synthetic oligonucleotide
aaaggtacttctcaggatcta

SEQ ID NO: 27361 - RNA, 21 nt, synthetic construct
  source 1..21: mol_type = other RNA; note = Description of Artificial Sequence: Synthetic oligonucleotide
caaaggtacttctcaggatct

SEQ ID NO: 27362 - RNA, 21 nt, synthetic construct
  source 1..21: mol_type = other RNA; note = Description of Artificial Sequence: Synthetic oligonucleotide
acaaaggtacttctcaggatc

SEQ ID NO: 27363 - RNA, 21 nt, synthetic construct
  source 1..21: mol_type = other RNA; note = Description of Artificial Sequence: Synthetic oligonucleotide
aacaaaggtacttctcaggat

SEQ ID NO: 27364 - RNA, 21 nt, synthetic construct
  source 1..21: mol_type = other RNA; note = Description of Artificial Sequence: Synthetic oligonucleotide
taacaaaggtacttctcagga

SEQ ID NO: 27365 - RNA, 21 nt, synthetic construct
  source 1..21: mol_type = other RNA; note = Description of Artificial Sequence: Synthetic oligonucleotide
gtaacaaaggtacttctcagg

SEQ ID NO: 27366 - RNA, 21 nt, synthetic construct
  source 1..21: mol_type = other RNA; note = Description of Artificial Sequence: Synthetic oligonucleotide
tgtaacaaaggtacttctcag

SEQ ID NO: 27367 - RNA, 21 nt, synthetic construct
  source 1..21: mol_type = other RNA; note = Description of Artificial Sequence: Synthetic oligonucleotide
ctgtaacaaaggtacttctca

SEQ ID NO: 27368 - RNA, 21 nt, synthetic construct
  source 1..21: mol_type = other RNA; note = Description of Artificial Sequence: Synthetic oligonucleotide
gctgtaacaaaggtacttctc

SEQ ID NO: 27369 - RNA, 21 nt, synthetic construct
  source 1..21: mol_type = other RNA; note = Description of Artificial Sequence: Synthetic oligonucleotide
agctgtaacaaaggtacttct

SEQ ID NO: 27370 - RNA, 21 nt, synthetic construct
  source 1..21: mol_type = other RNA; note = Description of Artificial Sequence: Synthetic oligonucleotide
tagctgtaacaaaggtacttc

SEQ ID NO: 27371 - RNA, 21 nt, synthetic construct
  source 1..21: mol_type = other RNA; note = Description of Artificial Sequence: Synthetic oligonucleotide
gtagctgtaacaaaggtactt

SEQ ID NO: 27372 - RNA, 21 nt, synthetic construct
  source 1..21: mol_type = other RNA; note = Description of Artificial Sequence: Synthetic oligonucleotide
agtagctgtaacaaaggtact

SEQ ID NO: 27373 - RNA, 21 nt, synthetic construct
  source 1..21: mol_type = other RNA; note = Description of Artificial Sequence: Synthetic oligonucleotide
tagtagctgtaacaaaggtac

SEQ ID NO: 27374 - RNA, 21 nt, synthetic construct
  source 1..21: mol_type = other RNA; note = Description of Artificial Sequence: Synthetic oligonucleotide
atagtagctgtaacaaaggta

SEQ ID NO: 27375 - RNA, 21 nt, synthetic construct
  source 1..21: mol_type = other RNA; note = Description of Artificial Sequence: Synthetic oligonucleotide
tatagtagctgtaacaaaggt

SEQ ID NO: 27376 - RNA, 21 nt, synthetic construct
  source 1..21: mol_type = other RNA; note = Description of Artificial Sequence: Synthetic oligonucleotide
ttatagtagctgtaacaaagg

SEQ ID NO: 27377 - RNA, 21 nt, synthetic construct
  source 1..21: mol_type = other RNA; note = Description of Artificial Sequence: Synthetic oligonucleotide
tttatagtagctgtaacaaag

SEQ ID NO: 27378 - RNA, 21 nt, synthetic construct
  source 1..21: mol_type = other RNA; note = Description of Artificial Sequence: Synthetic oligonucleotide
atttatagtagctgtaacaaa

SEQ ID NO: 27379 - RNA, 21 nt, synthetic construct
  source 1..21: mol_type = other RNA; note = Description of Artificial Sequence: Synthetic oligonucleotide
tatttatagtagctgtaacaa

SEQ ID NO: 27380 - RNA, 21 nt, synthetic construct
  source 1..21: mol_type = other RNA; note = Description of Artificial Sequence: Synthetic oligonucleotide
atatttatagtagctgtaaca

SEQ ID NO: 27381 - RNA, 21 nt, synthetic construct
  source 1..21: mol_type = other RNA; note = Description of Artificial Sequence: Synthetic oligonucleotide
tatatttatagtagctgtaac

SEQ ID NO: 27382 - RNA, 21 nt, synthetic construct
  source 1..21: mol_type = other RNA; note = Description of Artificial Sequence: Synthetic oligonucleotide
gtatatttatagtagctgtaa

SEQ ID NO: 27383 - RNA, 21 nt, synthetic construct
  source 1..21: mol_type = other RNA; note = Description of Artificial Sequence: Synthetic oligonucleotide
tgtatatttatagtagctgta

SEQ ID NO: 27384 - RNA, 21 nt, synthetic construct
  source 1..21: mol_type = other RNA; note = Description of Artificial Sequence: Synthetic oligonucleotide
atgtatatttatagtagctgt

SEQ ID NO: 27385 - RNA, 21 nt, synthetic construct
  source 1..21: mol_type = other RNA; note = Description of Artificial Sequence: Synthetic oligonucleotide
tatgtatatttatagtagctg

SEQ ID NO: 27386 - RNA, 21 nt, synthetic construct
  source 1..21: mol_type = other RNA; note = Description of Artificial Sequence: Synthetic oligonucleotide
atatgtatatttatagtagct

SEQ ID NO: 27387 - RNA, 21 nt, synthetic construct
  source 1..21: mol_type = other RNA; note = Description of Artificial Sequence: Synthetic oligonucleotide
tatatgtatatttatagtagc

SEQ ID NO: 27388 - RNA, 21 nt, synthetic construct
  source 1..21: mol_type = other RNA; note = Description of Artificial Sequence: Synthetic oligonucleotide
ttatatgtatatttatagtag

SEQ ID NO: 27389 - RNA, 21 nt, synthetic construct
  source 1..21: mol_type = other RNA; note = Description of Artificial Sequence: Synthetic oligonucleotide
tttatatgtatatttatagta

SEQ ID NO: 27390 - RNA, 21 nt, synthetic construct
  source 1..21: mol_type = other RNA; note = Description of Artificial Sequence: Synthetic oligonucleotide
atttatatgtatatttatagt

SEQ ID NO: 27391 - RNA, 21 nt, synthetic construct
  source 1..21: mol_type = other RNA; note = Description of Artificial Sequence: Synthetic oligonucleotide
aatttatatgtatatttatag

SEQ ID NO: 27392 - RNA, 21 nt, synthetic construct
  source 1..21: mol_type = other RNA; note = Description of Artificial Sequence: Synthetic oligonucleotide
taatttatatgtatatttata

SEQ ID NO: 27393 - RNA, 21 nt, synthetic construct
  source 1..21: mol_type = other RNA; note = Description of Artificial Sequence: Synthetic oligonucleotide
ataatttatatgtatatttat

SEQ ID NO: 27394 - RNA, 21 nt, synthetic construct
  source 1..21: mol_type = other RNA; note = Description of Artificial Sequence: Synthetic oligonucleotide
tataatttatatgtatattta

SEQ ID NO: 27395 - RNA, 21 nt, synthetic construct
  source 1..21: mol_type = other RNA; note = Description of Artificial Sequence: Synthetic oligonucleotide
ctataatttatatgtatattt

SEQ ID NO: 27396 - RNA, 21 nt, synthetic construct
  source 1..21: mol_type = other RNA; note = Description of Artificial Sequence: Synthetic oligonucleotide
tctataatttatatgtatatt

SEQ ID NO: 27397 - RNA, 21 nt, synthetic construct
  source 1..21: mol_type = other RNA; note = Description of Artificial Sequence: Synthetic oligonucleotide
ttctataatttatatgtatat

SEQ ID NO: 27398 - RNA, 21 nt, synthetic construct
  source 1..21: mol_type = other RNA; note = Description of Artificial Sequence: Synthetic oligonucleotide
attctataatttatatgtata

SEQ ID NO: 27399 - RNA, 21 nt, synthetic construct
  source 1..21: mol_type = other RNA; note = Description of Artificial Sequence: Synthetic oligonucleotide
gattctataatttatatgtat

SEQ ID NO: 27400 - RNA, 21 nt, synthetic construct
  source 1..21: mol_type = other RNA; note = Description of Artificial Sequence: Synthetic oligonucleotide
agattctataatttatatgta

SEQ ID NO: 27401 - RNA, 21 nt, synthetic construct
  source 1..21: mol_type = other RNA; note = Description of Artificial Sequence: Synthetic oligonucleotide
tagattctataatttatatgt

SEQ ID NO: 27402 - RNA, 21 nt, synthetic construct
  source 1..21: mol_type = other RNA; note = Description of Artificial Sequence: Synthetic oligonucleotide
gtagattctataatttatatg

SEQ ID NO: 27403 - RNA, 21 nt, synthetic construct
  source 1..21: mol_type = other RNA; note = Description of Artificial Sequence: Synthetic oligonucleotide
agtagattctataatttatat

SEQ ID NO: 27404 - RNA, 21 nt, synthetic construct
  source 1..21: mol_type = other RNA; note = Description of Artificial Sequence: Synthetic oligonucleotide
aagtagattctataatttata

SEQ ID NO: 27405 - RNA, 21 nt, synthetic construct
  source 1..21: mol_type = other RNA; note = Description of Artificial Sequence: Synthetic oligonucleotide
aaagtagattctataatttat

SEQ ID NO: 27406 - RNA, 21 nt, synthetic construct
  source 1..21: mol_type = other RNA; note = Description of Artificial Sequence: Synthetic oligonucleotide
taaagtagattctataattta

SEQ ID NO: 27407 - RNA, 21 nt, synthetic construct
  source 1..21: mol_type = other RNA; note = Description of Artificial Sequence: Synthetic oligonucleotide
ttaaagtagattctataattt

SEQ ID NO: 27408 - RNA, 21 nt, synthetic construct
  source 1..21: mol_type = other RNA; note = Description of Artificial Sequence: Synthetic oligonucleotide
attaaagtagattctataatt

SEQ ID NO: 27409 - RNA, 21 nt, synthetic construct
  source 1..21: mol_type = other RNA; note = Description of Artificial Sequence: Synthetic oligonucleotide
aattaaagtagattctataat

SEQ ID NO: 27410 - RNA, 21 nt, synthetic construct
  source 1..21: mol_type = other RNA; note = Description of Artificial Sequence: Synthetic oligonucleotide
aaattaaagtagattctataa

SEQ ID NO: 27411 - RNA, 21 nt, synthetic construct
  source 1..21: mol_type = other RNA; note = Description of Artificial Sequence: Synthetic oligonucleotide
taaattaaagtagattctata

SEQ ID NO: 27412 - RNA, 21 nt, synthetic construct
  source 1..21: mol_type = other RNA; note = Description of Artificial Sequence: Synthetic oligonucleotide
ataaattaaagtagattctat

SEQ ID NO: 27413 - RNA, 21 nt, synthetic construct
  source 1..21: mol_type = other RNA; note = Description of Artificial Sequence: Synthetic oligonucleotide
aataaattaaagtagattcta

SEQ ID NO: 27414 - RNA, 21 nt, synthetic construct
  source 1..21: mol_type = other RNA; note = Description of Artificial Sequence: Synthetic oligonucleotide
aaataaattaaagtagattct

SEQ ID NO: 27415 - RNA, 21 nt, synthetic construct
  source 1..21: mol_type = other RNA; note = Description of Artificial Sequence: Synthetic oligonucleotide
aaaataaattaaagtagattc

SEQ ID NO: 27416 - RNA, 21 nt, synthetic construct
  source 1..21: mol_type = other RNA; note = Description of Artificial Sequence: Synthetic oligonucleotide
caaaataaattaaagtagatt

SEQ ID NO: 27417 - RNA, 21 nt, synthetic construct
  source 1..21: mol_type = other RNA; note = Description of Artificial Sequence: Synthetic oligonucleotide
acaaaataaattaaagtagat

SEQ ID NO: 27418 - RNA, 21 nt, synthetic construct
  source 1..21: mol_type = other RNA; note = Description of Artificial Sequence: Synthetic oligonucleotide
cacaaaataaattaaagtaga

SEQ ID NO: 27419 - RNA, 21 nt, synthetic construct
  source 1..21: mol_type = other RNA; note = Description of Artificial Sequence: Synthetic oligonucleotide
tcacaaaataaattaaagtag

SEQ ID NO: 27420 - RNA, 21 nt, synthetic construct
  source 1..21: mol_type = other RNA; note = Description of Artificial Sequence: Synthetic oligonucleotide
ttcacaaaataaattaaagta

SEQ ID NO: 27421 - RNA, 21 nt, synthetic construct
  source 1..21: mol_type = other RNA; note = Description of Artificial Sequence: Synthetic oligonucleotide
gttcacaaaataaattaaagt

SEQ ID NO: 27422 - RNA, 21 nt, synthetic construct
  source 1..21: mol_type = other RNA; note = Description of Artificial Sequence: Synthetic oligonucleotide
tgttcacaaaataaattaaag

SEQ ID NO: 27423 - RNA, 21 nt, synthetic construct
  source 1..21: mol_type = other RNA; note = Description of Artificial Sequence: Synthetic oligonucleotide
gtgttcacaaaataaattaaa

SEQ ID NO: 27424 - RNA, 21 nt, synthetic construct
  source 1..21: mol_type = other RNA; note = Description of Artificial Sequence: Synthetic oligonucleotide
agtgttcacaaaataaattaa

SEQ ID NO: 27425 - RNA, 21 nt, synthetic construct
  source 1..21: mol_type = other RNA; note = Description of Artificial Sequence: Synthetic oligonucleotide
aagtgttcacaaaataaatta

SEQ ID NO: 27426 - RNA, 21 nt, synthetic construct
  source 1..21: mol_type = other RNA; note = Description of Artificial Sequence: Synthetic oligonucleotide
aaagtgttcacaaaataaatt

SEQ ID NO: 27427 - RNA, 21 nt, synthetic construct
  source 1..21: mol_type = other RNA; note = Description of Artificial Sequence: Synthetic oligonucleotide
aaaagtgttcacaaaataaat

SEQ ID NO: 27428 - RNA, 21 nt, synthetic construct
  source 1..21: mol_type = other RNA; note = Description of Artificial Sequence: Synthetic oligonucleotide
caaaagtgttcacaaaataaa

SEQ ID NO: 27429 - RNA, 21 nt, synthetic construct
  source 1..21: mol_type = other RNA; note = Description of Artificial Sequence: Synthetic oligonucleotide
tcaaaagtgttcacaaaataa

SEQ ID NO: 27430 - RNA, 21 nt, synthetic construct
  source 1..21: mol_type = other RNA; note = Description of Artificial Sequence: Synthetic oligonucleotide
ttcaaaagtgttcacaaaata

SEQ ID NO: 27431 - RNA, 21 nt, synthetic construct
  source 1..21: mol_type = other RNA; note = Description of Artificial Sequence: Synthetic oligonucleotide
tttcaaaagtgttcacaaaat

SEQ ID NO: 27432 - RNA, 21 nt, synthetic construct
  source 1..21: mol_type = other RNA; note = Description of Artificial Sequence: Synthetic oligonucleotide
ttttcaaaagtgttcacaaaa

SEQ ID NO: 27433 - RNA, 21 nt, synthetic construct
  source 1..21: mol_type = other RNA; note = Description of Artificial Sequence: Synthetic oligonucleotide
attttcaaaagtgttcacaaa

SEQ ID NO: 27434 - RNA, 21 nt, synthetic construct
  source 1..21: mol_type = other RNA; note = Description of Artificial Sequence: Synthetic oligonucleotide
cattttcaaaagtgttcacaa

SEQ ID NO: 27435 - RNA, 21 nt, synthetic construct
  source 1..21: mol_type = other RNA; note = Description of Artificial Sequence: Synthetic oligonucleotide
acattttcaaaagtgttcaca

SEQ ID NO: 27436 - RNA, 21 nt, synthetic construct
  source 1..21: mol_type = other RNA; note = Description of Artificial Sequence: Synthetic oligonucleotide
tacattttcaaaagtgttcac

SEQ ID NO: 27437 - RNA, 21 nt, synthetic construct
  source 1..21: mol_type = other RNA; note = Description of Artificial Sequence: Synthetic oligonucleotide
gtacattttcaaaagtgttca

SEQ ID NO: 27438 - RNA, 21 nt, synthetic construct
  source 1..21: mol_type = other RNA; note = Description of Artificial Sequence: Synthetic oligonucleotide
tgtacattttcaaaagtgttc

SEQ ID NO: 27439 - RNA, 21 nt, synthetic construct
  source 1..21: mol_type = other RNA; note = Description of Artificial Sequence: Synthetic oligonucleotide
atgtacattttcaaaagtgtt

SEQ ID NO: 27440 - RNA, 21 nt, synthetic construct
  source 1..21: mol_type = other RNA; note = Description of Artificial Sequence: Synthetic oligonucleotide
catgtacattttcaaaagtgt

SEQ ID NO: 27441 - RNA, 21 nt, synthetic construct
  source 1..21: mol_type = other RNA; note = Description of Artificial Sequence: Synthetic oligonucleotide
acatgtacattttcaaaagtg

SEQ ID NO: 27442 - RNA, 21 nt, synthetic construct
  source 1..21: mol_type = other RNA; note = Description of Artificial Sequence: Synthetic oligonucleotide
aacatgtacattttcaaaagt

SEQ ID NO: 27443 - RNA, 21 nt, synthetic construct
  source 1..21: mol_type = other RNA; note = Description of Artificial Sequence: Synthetic oligonucleotide
gaacatgtacattttcaaaag

SEQ ID NO: 27444 - RNA, 21 nt, synthetic construct
  source 1..21: mol_type = other RNA; note = Description of Artificial Sequence: Synthetic oligonucleotide
ggaacatgtacattttcaaaa

SEQ ID NO: 27445 - RNA, 21 nt, synthetic construct
  source 1..21: mol_type = other RNA; note = Description of Artificial Sequence: Synthetic oligonucleotide
aggaacatgtacattttcaaa

SEQ ID NO: 27446 - RNA, 21 nt, synthetic construct
  source 1..21: mol_type = other RNA; note = Description of Artificial Sequence: Synthetic oligonucleotide
aaggaacatgtacattttcaa

SEQ ID NO: 27447 - RNA, 21 nt, synthetic construct
  source 1..21: mol_type = other RNA; note = Description of Artificial Sequence: Synthetic oligonucleotide
aaaggaacatgtacattttca

SEQ ID NO: 27448 - RNA, 21 nt, synthetic construct
  source 1..21: mol_type = other RNA; note = Description of Artificial Sequence: Synthetic oligonucleotide
caaaggaacatgtacattttc

SEQ ID NO: 27449 - RNA, 21 nt, synthetic construct
  source 1..21: mol_type = other RNA; note = Description of Artificial Sequence: Synthetic oligonucleotide
acaaaggaacatgtacatttt

SEQ ID NO: 27450 - RNA, 21 nt, synthetic construct
  source 1..21: mol_type = other RNA; note = Description of Artificial Sequence: Synthetic oligonucleotide
tacaaaggaacatgtacattt

SEQ ID NO: 27451 - RNA, 21 nt, synthetic construct
  source 1..21: mol_type = other RNA; note = Description of Artificial Sequence: Synthetic oligonucleotide
ttacaaaggaacatgtacatt

SEQ ID NO: 27452 - RNA, 21 nt, synthetic construct
  source 1..21: mol_type = other RNA; note = Description of Artificial Sequence: Synthetic oligonucleotide
attacaaaggaacatgtacat

SEQ ID NO: 27453 - RNA, 21 nt, synthetic construct
  source 1..21: mol_type = other RNA; note = Description of Artificial Sequence: Synthetic oligonucleotide
aattacaaaggaacatgtaca

SEQ ID NO: 27454 - RNA, 21 nt, synthetic construct
  source 1..21: mol_type = other RNA; note = Description of Artificial Sequence: Synthetic oligonucleotide
caattacaaaggaacatgtac

SEQ ID NO: 27455 - RNA, 21 nt, synthetic construct
  source 1..21: mol_type = other RNA; note = Description of Artificial Sequence: Synthetic oligonucleotide
tcaattacaaaggaacatgta

SEQ ID NO: 27456 - RNA, 21 nt, synthetic construct
  source 1..21: mol_type = other RNA; note = Description of Artificial Sequence: Synthetic oligonucleotide
gtcaattacaaaggaacatgt

SEQ ID NO: 27457 - RNA, 21 nt, synthetic construct
  source 1..21: mol_type = other RNA; note = Description of Artificial Sequence: Synthetic oligonucleotide
tgtcaattacaaaggaacatg

SEQ ID NO: 27458 - RNA, 21 nt, synthetic construct
  source 1..21: mol_type = other RNA; note = Description of Artificial Sequence: Synthetic oligonucleotide
gtgtcaattacaaaggaacat

SEQ ID NO: 27459 - RNA, 21 nt, synthetic construct
  source 1..21: mol_type = other RNA; note = Description of Artificial Sequence: Synthetic oligonucleotide
agtgtcaattacaaaggaaca

SEQ ID NO: 27460 - RNA, 21 nt, synthetic construct
  source 1..21: mol_type = other RNA; note = Description of Artificial Sequence: Synthetic oligonucleotide
tagtgtcaattacaaaggaac

SEQ ID NO: 27461 - RNA, 21 nt, synthetic construct
  source 1..21: mol_type = other RNA; note = Description of Artificial Sequence: Synthetic oligonucleotide
atagtgtcaattacaaaggaa

SEQ ID NO: 27462 - RNA, 21 nt, synthetic construct
  source 1..21: mol_type = other RNA; note = Description of Artificial Sequence: Synthetic oligonucleotide
tatagtgtcaattacaaagga

SEQ ID NO: 27463 - RNA, 21 nt, synthetic construct
  source 1..21: mol_type = other RNA; note = Description of Artificial Sequence: Synthetic oligonucleotide
atatagtgtcaattacaaagg

SEQ ID NO: 27464 - RNA, 21 nt, synthetic construct
  source 1..21: mol_type = other RNA; note = Description of Artificial Sequence: Synthetic oligonucleotide
tatatagtgtcaattacaaag

SEQ ID NO: 27465 - RNA, 21 nt, synthetic construct
  source 1..21: mol_type = other RNA; note = Description of Artificial Sequence: Synthetic oligonucleotide
atatatagtgtcaattacaaa

SEQ ID NO: 27466 - RNA, 21 nt, synthetic construct
  source 1..21: mol_type = other RNA; note = Description of Artificial Sequence: Synthetic oligonucleotide
aatatatagtgtcaattacaa

SEQ ID NO: 27467 - RNA, 21 nt, synthetic construct
  source 1..21: mol_type = other RNA; note = Description of Artificial Sequence: Synthetic oligonucleotide
aaatatatagtgtcaattaca

SEQ ID NO: 27468 - RNA, 21 nt, synthetic construct
  source 1..21: mol_type = other RNA; note = Description of Artificial Sequence: Synthetic oligonucleotide
gaaatatatagtgtcaattac

SEQ ID NO: 27469 - RNA, 21 nt, synthetic construct
  source 1..21: mol_type = other RNA; note = Description of Artificial Sequence: Synthetic oligonucleotide
agaaatatatagtgtcaatta

SEQ ID NO: 27470 - RNA, 21 nt, synthetic construct
  source 1..21: mol_type = other RNA; note = Description of Artificial Sequence: Synthetic oligonucleotide
aagaaatatatagtgtcaatt

SEQ ID NO: 27471 - RNA, 21 nt, synthetic construct
  source 1..21: mol_type = other RNA; note = Description of Artificial Sequence: Synthetic oligonucleotide
taagaaatatatagtgtcaat

SEQ ID NO: 27472 - RNA, 21 nt, synthetic construct
  source 1..21: mol_type = other RNA; note = Description of Artificial Sequence: Synthetic oligonucleotide
ttaagaaatatatagtgtcaa

SEQ ID NO: 27473 - RNA, 21 nt, synthetic construct
  source 1..21: mol_type = other RNA; note = Description of Artificial Sequence: Synthetic oligonucleotide
attaagaaatatatagtgtca

SEQ ID NO: 27474 - RNA, 21 nt, synthetic construct
  source 1..21: mol_type = other RNA; note = Description of Artificial Sequence: Synthetic oligonucleotide
tattaagaaatatatagtgtc

SEQ ID NO: 27475 - RNA, 21 nt, synthetic construct
  source 1..21: mol_type = other RNA; note = Description of Artificial Sequence: Synthetic oligonucleotide
ttattaagaaatatatagtgt

SEQ ID NO: 27476 - RNA, 21 nt, synthetic construct
  source 1..21: mol_type = other RNA; note = Description of Artificial Sequence: Synthetic oligonucleotide
tttattaagaaatatatagtg

SEQ ID NO: 27477 - RNA, 21 nt, synthetic construct
  source 1..21: mol_type = other RNA; note = Description of Artificial Sequence: Synthetic oligonucleotide
ttttattaagaaatatatagt

SEQ ID NO: 27478 - RNA, 21 nt, synthetic construct
  source 1..21: mol_type = other RNA; note = Description of Artificial Sequence: Synthetic oligonucleotide
attttattaagaaatatatag

SEQ ID NO: 27479 - RNA, 21 nt, synthetic construct
  source 1..21: mol_type = other RNA; note = Description of Artificial Sequence: Synthetic oligonucleotide
tattttattaagaaatatata

SEQ ID NO: 27480 - RNA, 21 nt, synthetic construct
  source 1..21: mol_type = other RNA; note = Description of Artificial Sequence: Synthetic oligonucleotide
ttattttattaagaaatatat

SEQ ID NO: 27481 - RNA, 21 nt, synthetic construct
  source 1..21: mol_type = other RNA; note = Description of Artificial Sequence: Synthetic oligonucleotide
attattttattaagaaatata

SEQ ID NO: 27482 - RNA, 21 nt, synthetic construct
  source 1..21: mol_type = other RNA; note = Description of Artificial Sequence: Synthetic oligonucleotide
aattattttattaagaaatat

SEQ ID NO: 27483 - RNA, 21 nt, synthetic construct
  source 1..21: mol_type = other RNA; note = Description of Artificial Sequence: Synthetic oligonucleotide
gaattattttattaagaaata

SEQ ID NO: 27484 - RNA, 21 nt, synthetic construct
  source 1..21: mol_type = other RNA; note = Description of Artificial Sequence: Synthetic oligonucleotide
agaattattttattaagaaat

SEQ ID NO: 27485 - RNA, 21 nt, synthetic construct
  source 1..21: mol_type = other RNA; note = Description of Artificial Sequence: Synthetic oligonucleotide
gagaattattttattaagaaa

SEQ ID NO: 27486 - RNA, 21 nt, synthetic construct
  source 1..21: mol_type = other RNA; note = Description of Artificial Sequence: Synthetic oligonucleotide
tgagaattattttattaagaa

SEQ ID NO: 27487 - RNA, 21 nt, synthetic construct
  source 1..21: mol_type = other RNA; note = Description of Artificial Sequence: Synthetic oligonucleotide
ttgagaattattttattaaga

SEQ ID NO: 27488 - RNA, 21 nt, synthetic construct
  source 1..21: mol_type = other RNA; note = Description of Artificial Sequence: Synthetic oligonucleotide
tttgagaattattttattaag

SEQ ID NO: 27489 - RNA, 21 nt, synthetic construct
  source 1..21: mol_type = other RNA; note = Description of Artificial Sequence: Synthetic oligonucleotide
atttgagaattattttattaa

SEQ ID NO: 27490 - RNA, 21 nt, synthetic construct
  source 1..21: mol_type = other RNA; note = Description of Artificial Sequence: Synthetic oligonucleotide
aatttgagaattattttatta

SEQ ID NO: 27491 - RNA, 21 nt, synthetic construct
  source 1..21: mol_type = other RNA; note = Description of Artificial Sequence: Synthetic oligonucleotide
aaatttgagaattattttatt

SEQ ID NO: 27492 - RNA, 21 nt, synthetic construct
  source 1..21: mol_type = other RNA; note = Description of Artificial Sequence: Synthetic oligonucleotide
caaatttgagaattattttat

SEQ ID NO: 27493 - RNA, 21 nt, synthetic construct
  source 1..21: mol_type = other RNA; note = Description of Artificial Sequence: Synthetic oligonucleotide
acaaatttgagaattatttta

SEQ ID NO: 27494 - RNA, 21 nt, synthetic construct
  source 1..21: mol_type = other RNA; note = Description of Artificial Sequence: Synthetic oligonucleotide
aacaaatttgagaattatttt

SEQ ID NO: 27495 - RNA, 21 nt, synthetic construct
  source 1..21: mol_type = other RNA; note = Description of Artificial Sequence: Synthetic oligonucleotide
aaacaaatttgagaattattt

SEQ ID NO: 27496 - RNA, 21 nt, synthetic construct
  source 1..21: mol_type = other RNA; note = Description of Artificial Sequence: Synthetic oligonucleotide
gaaacaaatttgagaattatt

SEQ ID NO: 27497 - RNA, 21 nt, synthetic construct
  source 1..21: mol_type = other RNA; note = Description of Artificial Sequence: Synthetic oligonucleotide
agaaacaaatttgagaattat

SEQ ID NO: 27498 - RNA, 21 nt, synthetic construct
  source 1..21: mol_type = other RNA; note = Description of Artificial Sequence: Synthetic oligonucleotide
aagaaacaaatttgagaatta

SEQ ID NO: 27499 - RNA, 21 nt, synthetic construct
  source 1..21: mol_type = other RNA; note = Description of Artificial Sequence: Synthetic oligonucleotide
taagaaacaaatttgagaatt

SEQ ID NO: 27500 - RNA, 21 nt, synthetic construct
  source 1..21: mol_type = other RNA; note = Description of Artificial Sequence: Synthetic oligonucleotide
ataagaaacaaatttgagaat

SEQ ID NO: 27501 - RNA, 21 nt, synthetic construct
  source 1..21: mol_type = other RNA; note = Description of Artificial Sequence: Synthetic oligonucleotide
cataagaaacaaatttgagaa

SEQ ID NO: 27502 - RNA, 21 nt, synthetic construct
  source 1..21: mol_type = other RNA; note = Description of Artificial Sequence: Synthetic oligonucleotide
tcataagaaacaaatttgaga

SEQ ID NO: 27503 - RNA, 21 nt, synthetic construct
  source 1..21: mol_type = other RNA; note = Description of Artificial Sequence: Synthetic oligonucleotide
ttcataagaaacaaatttgag

SEQ ID NO: 27504 - RNA, 21 nt, synthetic construct
  source 1..21: mol_type = other RNA; note = Description of Artificial Sequence: Synthetic oligonucleotide
attcataagaaacaaatttga

SEQ ID NO: 27505 - RNA, 21 nt, synthetic construct
  source 1..21: mol_type = other RNA; note = Description of Artificial Sequence: Synthetic oligonucleotide
gattcataagaaacaaatttg

SEQ ID NO: 27506 - RNA, 21 nt, synthetic construct
  source 1..21: mol_type = other RNA; note = Description of Artificial Sequence: Synthetic oligonucleotide
tgattcataagaaacaaattt

SEQ ID NO: 27507 - RNA, 21 nt, synthetic construct
  source 1..21: mol_type = other RNA; note = Description of Artificial Sequence: Synthetic oligonucleotide
atgattcataagaaacaaatt

SEQ ID NO: 27508 - RNA, 21 nt, synthetic construct
  source 1..21: mol_type = other RNA; note = Description of Artificial Sequence: Synthetic oligonucleotide
gatgattcataagaaacaaat

SEQ ID NO: 27509 - RNA, 21 nt, synthetic construct
  source 1..21: mol_type = other RNA; note = Description of Artificial Sequence: Synthetic oligonucleotide
agatgattcataagaaacaaa

SEQ ID NO: 27510 - RNA, 21 nt, synthetic construct
  source 1..21: mol_type = other RNA; note = Description of Artificial Sequence: Synthetic oligonucleotide
gagatgattcataagaaacaa

SEQ ID NO: 27511 - RNA, 21 nt, synthetic construct
  source 1..21: mol_type = other RNA; note = Description of Artificial Sequence: Synthetic oligonucleotide
agagatgattcataagaaaca

SEQ ID NO: 27512 - RNA, 21 nt, synthetic construct
  source 1..21: mol_type = other RNA; note = Description of Artificial Sequence: Synthetic oligonucleotide
gagagatgattcataagaaac

SEQ ID NO: 27513 - RNA, 21 nt, synthetic construct
  source 1..21: mol_type = other RNA; note = Description of Artificial Sequence: Synthetic oligonucleotide
tgagagatgattcataagaaa

SEQ ID NO: 27514 - RNA, 21 nt, synthetic construct
  source 1..21: mol_type = other RNA; note = Description of Artificial Sequence: Synthetic oligonucleotide
ttgagagatgattcataagaa

SEQ ID NO: 27515 - RNA, 21 nt, synthetic construct
  source 1..21: mol_type = other RNA; note = Description of Artificial Sequence: Synthetic oligonucleotide
tttgagagatgattcataaga

SEQ ID NO: 27516 - RNA, 21 nt, synthetic construct
  source 1..21: mol_type = other RNA; note = Description of Artificial Sequence: Synthetic oligonucleotide
atttgagagatgattcataag

SEQ ID NO: 27517 - RNA, 21 nt, synthetic construct
  source 1..21: mol_type = other RNA; note = Description of Artificial Sequence: Synthetic oligonucleotide
gatttgagagatgattcataa

SEQ ID NO: 27518 - RNA, 21 nt, synthetic construct
  source 1..21: mol_type = other RNA; note = Description of Artificial Sequence: Synthetic oligonucleotide
agatttgagagatgattcata

SEQ ID NO: 27519 - RNA, 21 nt, synthetic construct
  source 1..21: mol_type = other RNA; note = Description of Artificial Sequence: Synthetic oligonucleotide
tagatttgagagatgattcat

SEQ ID NO: 27520 - RNA, 21 nt, synthetic construct
  source 1..21: mol_type = other RNA; note = Description of Artificial Sequence: Synthetic oligonucleotide
ctagatttgagagatgattca

SEQ ID NO: 27521 - RNA, 21 nt, synthetic construct
  source 1..21: mol_type = other RNA; note = Description of Artificial Sequence: Synthetic oligonucleotide
actagatttgagagatgattc

SEQ ID NO: 27522 - RNA, 21 nt, synthetic construct
  source 1..21: mol_type = other RNA; note = Description of Artificial Sequence: Synthetic oligonucleotide
aactagatttgagagatgatt

SEQ ID NO: 27523 - RNA, 21 nt, synthetic construct
  source 1..21: mol_type = other RNA; note = Description of Artificial Sequence: Synthetic oligonucleotide
taactagatttgagagatgat

SEQ ID NO: 27524 - RNA, 21 nt, synthetic construct
  source 1..21: mol_type = other RNA; note = Description of Artificial Sequence: Synthetic oligonucleotide
ctaactagatttgagagatga

SEQ ID NO: 27525 - RNA, 21 nt, synthetic construct
  source 1..21: mol_type = other RNA; note = Description of Artificial Sequence: Synthetic oligonucleotide
tctaactagatttgagagatg

SEQ ID NO: 27526 - RNA, 21 nt, synthetic construct
  source 1..21: mol_type = other RNA; note = Description of Artificial Sequence: Synthetic oligonucleotide
gtctaactagatttgagagat

SEQ ID NO: 27527 - RNA, 21 nt, synthetic construct
  source 1..21: mol_type = other RNA; note = Description of Artificial Sequence: Synthetic oligonucleotide
tgtctaactagatttgagaga

SEQ ID NO: 27528 - RNA, 21 nt, synthetic construct
  source 1..21: mol_type = other RNA; note = Description of Artificial Sequence: Synthetic oligonucleotide
ttgtctaactagatttgagag

SEQ ID NO: 27529 - RNA, 21 nt, synthetic construct
  source 1..21: mol_type = other RNA; note = Description of Artificial Sequence: Synthetic oligonucleotide
attgtctaactagatttgaga

SEQ ID NO: 27530 - RNA, 21 nt, synthetic construct
  source 1..21: mol_type = other RNA; note = Description of Artificial Sequence: Synthetic oligonucleotide
aattgtctaactagatttgag

SEQ ID NO: 27531 - RNA, 21 nt, synthetic construct
  source 1..21: mol_type = other RNA; note = Description of Artificial Sequence: Synthetic oligonucleotide
aaattgtctaactagatttga

SEQ ID NO: 27532 - RNA, 21 nt, synthetic construct
  source 1..21: mol_type = other RNA; note = Description of Artificial Sequence: Synthetic oligonucleotide
caaattgtctaactagatttg

SEQ ID NO: 27533 - RNA, 21 nt, synthetic construct
  source 1..21: mol_type = other RNA; note = Description of Artificial Sequence: Synthetic oligonucleotide
gcaaattgtctaactagattt

SEQ ID NO: 27534 - RNA, 21 nt, synthetic construct
  source 1..21: mol_type = other RNA; note = Description of Artificial Sequence: Synthetic oligonucleotide
tgcaaattgtctaactagatt

SEQ ID NO: 27535 - RNA, 21 nt, synthetic construct
  source 1..21: mol_type = other RNA; note = Description of Artificial Sequence: Synthetic oligonucleotide
gtgcaaattgtctaactagat

SEQ ID NO: 27536 - RNA, 21 nt, synthetic construct
  source 1..21: mol_type = other RNA; note = Description of Artificial Sequence: Synthetic oligonucleotide
tgtgcaaattgtctaactaga

SEQ ID NO: 27537 - RNA, 21 nt, synthetic construct
  source 1..21: mol_type = other RNA; note = Description of Artificial Sequence: Synthetic oligonucleotide
gtgtgcaaattgtctaactag

SEQ ID NO: 27538 - RNA, 21 nt, synthetic construct
  source 1..21: mol_type = other RNA; note = Description of Artificial Sequence: Synthetic oligonucleotide
tgtgtgcaaattgtctaacta

SEQ ID NO: 27539 - RNA, 21 nt, synthetic construct
  source 1..21: mol_type = other RNA; note = Description of Artificial Sequence: Synthetic oligonucleotide
atgtgtgcaaattgtctaact

SEQ ID NO: 27540 - RNA, 21 nt, synthetic construct
  source 1..21: mol_type = other RNA; note = Description of Artificial Sequence: Synthetic oligonucleotide
tatgtgtgcaaattgtctaac

SEQ ID NO: 27541 - RNA, 21 nt, synthetic construct
  source 1..21: mol_type = other RNA; note = Description of Artificial Sequence: Synthetic oligonucleotide
gtatgtgtgcaaattgtctaa

SEQ ID NO: 27542 - RNA, 21 nt, synthetic construct
  source 1..21: mol_type = other RNA; note = Description of Artificial Sequence: Synthetic oligonucleotide
agtatgtgtgcaaattgtcta

SEQ ID NO: 27543 - RNA, 21 nt, synthetic construct
  source 1..21: mol_type = other RNA; note = Description of Artificial Sequence: Synthetic oligonucleotide
aagtatgtgtgcaaattgtct

SEQ ID NO: 27544 - RNA, 21 nt, synthetic construct
  source 1..21: mol_type = other RNA; note = Description of Artificial Sequence: Synthetic oligonucleotide
aaagtatgtgtgcaaattgtc

SEQ ID NO: 27545 - RNA, 21 nt, synthetic construct
  source 1..21: mol_type = other RNA; note = Description of Artificial Sequence: Synthetic oligonucleotide
aaaagtatgtgtgcaaattgt

SEQ ID NO: 27546 - RNA, 21 nt, synthetic construct
  source 1..21: mol_type = other RNA; note = Description of Artificial Sequence: Synthetic oligonucleotide
gaaaagtatgtgtgcaaattg

SEQ ID NO: 27547 - RNA, 21 nt, synthetic construct
  source 1..21: mol_type = other RNA; note = Description of Artificial Sequence: Synthetic oligonucleotide
agaaaagtatgtgtgcaaatt

SEQ ID NO: 27548 - RNA, 21 nt, synthetic construct
  source 1..21: mol_type = other RNA; note = Description of Artificial Sequence: Synthetic oligonucleotide
tagaaaagtatgtgtgcaaat

SEQ ID NO: 27549 - RNA, 21 nt, synthetic construct
  source 1..21: mol_type = other RNA; note = Description of Artificial Sequence: Synthetic oligonucleotide
ttagaaaagtatgtgtgcaaa

SEQ ID NO: 27550 - RNA, 21 nt, synthetic construct
  source 1..21: mol_type = other RNA; note = Description of Artificial Sequence: Synthetic oligonucleotide
cttagaaaagtatgtgtgcaa

SEQ ID NO: 27551 - RNA, 21 nt, synthetic construct
  source 1..21: mol_type = other RNA; note = Description of Artificial Sequence: Synthetic oligonucleotide
ccttagaaaagtatgtgtgca

SEQ ID NO: 27552 - RNA, 21 nt, synthetic construct
  source 1..21: mol_type = other RNA; note = Description of Artificial Sequence: Synthetic oligonucleotide
cccttagaaaagtatgtgtgc

SEQ ID NO: 27553 - RNA, 21 nt, synthetic construct
  source 1..21: mol_type = other RNA; note = Description of Artificial Sequence: Synthetic oligonucleotide
tcccttagaaaagtatgtgtg

SEQ ID NO: 27554 - RNA, 21 nt, synthetic construct
  source 1..21: mol_type = other RNA; note = Description of Artificial Sequence: Synthetic oligonucleotide
gtcccttagaaaagtatgtgt

SEQ ID NO: 27555 - RNA, 21 nt, synthetic construct
  source 1..21: mol_type = other RNA; note = Description of Artificial Sequence: Synthetic oligonucleotide
tgtcccttagaaaagtatgtg

SEQ ID NO: 27556 - RNA, 21 nt, synthetic construct
  source 1..21: mol_type = other RNA; note = Description of Artificial Sequence: Synthetic oligonucleotide
atgtcccttagaaaagtatgt

SEQ ID NO: 27557 - RNA, 21 nt, synthetic construct
  source 1..21: mol_type = other RNA; note = Description of Artificial Sequence: Synthetic oligonucleotide
aatgtcccttagaaaagtatg

SEQ ID NO: 27558 - RNA, 21 nt, synthetic construct
  source 1..21: mol_type = other RNA; note = Description of Artificial Sequence: Synthetic oligonucleotide
taatgtcccttagaaaagtat

SEQ ID NO: 27559 - RNA, 21 nt, synthetic construct
  source 1..21: mol_type = other RNA; note = Description of Artificial Sequence: Synthetic oligonucleotide
ataatgtcccttagaaaagta

SEQ ID NO: 27560 - RNA, 21 nt, synthetic construct
  source 1..21: mol_type = other RNA; note = Description of Artificial Sequence: Synthetic oligonucleotide
gataatgtcccttagaaaagt

SEQ ID NO: 27561 - RNA, 21 nt, synthetic construct
  source 1..21: mol_type = other RNA; note = Description of Artificial Sequence: Synthetic oligonucleotide
agataatgtcccttagaaaag

SEQ ID NO: 27562 - RNA, 21 nt, synthetic construct
  source 1..21: mol_type = other RNA; note = Description of Artificial Sequence: Synthetic oligonucleotide
aagataatgtcccttagaaaa

SEQ ID NO: 27563 - RNA, 21 nt, synthetic construct
  source 1..21: mol_type = other RNA; note = Description of Artificial Sequence: Synthetic oligonucleotide
gaagataatgtcccttagaaa

SEQ ID NO: 27564 - RNA, 21 nt, synthetic construct
  source 1..21: mol_type = other RNA; note = Description of Artificial Sequence: Synthetic oligonucleotide
ggaagataatgtcccttagaa

SEQ ID NO: 27565 - RNA, 21 nt, synthetic construct
  source 1..21: mol_type = other RNA; note = Description of Artificial Sequence: Synthetic oligonucleotide
aggaagataatgtcccttaga

SEQ ID NO: 27566 - RNA, 21 nt, synthetic construct
  source 1..21: mol_type = other RNA; note = Description of Artificial Sequence: Synthetic oligonucleotide
aaggaagataatgtcccttag

SEQ ID NO: 27567 - RNA, 21 nt, synthetic construct
  source 1..21: mol_type = other RNA; note = Description of Artificial Sequence: Synthetic oligonucleotide
gaaggaagataatgtccctta

SEQ ID NO: 27568 - RNA, 21 nt, synthetic construct
  source 1..21: mol_type = other RNA; note = Description of Artificial Sequence: Synthetic oligonucleotide
tgaaggaagataatgtccctt

SEQ ID NO: 27569 - RNA, 21 nt, synthetic construct
  source 1..21: mol_type = other RNA; note = Description of Artificial Sequence: Synthetic oligonucleotide
ctgaaggaagataatgtccct

SEQ ID NO: 27570 - RNA, 21 nt, synthetic construct
  source 1..21: mol_type = other RNA; note = Description of Artificial Sequence: Synthetic oligonucleotide
cctgaaggaagataatgtccc

SEQ ID NO: 27571 - RNA, 21 nt, synthetic construct
  source 1..21: mol_type = other RNA; note = Description of Artificial Sequence: Synthetic oligonucleotide
acctgaaggaagataatgtcc

SEQ ID NO: 27572 - RNA, 21 nt, synthetic construct
  source 1..21: mol_type = other RNA; note = Description of Artificial Sequence: Synthetic oligonucleotide
aacctgaaggaagataatgtc

SEQ ID NO: 27573 - RNA, 21 nt, synthetic construct
  source 1..21: mol_type = other RNA; note = Description of Artificial Sequence: Synthetic oligonucleotide
aaacctgaaggaagataatgt

SEQ ID NO: 27574 - RNA, 21 nt, synthetic construct
  source 1..21: mol_type = other RNA; note = Description of Artificial Sequence: Synthetic oligonucleotide
aaaacctgaaggaagataatg

SEQ ID NO: 27575 - RNA, 21 nt, synthetic construct
  source 1..21: mol_type = other RNA; note = Description of Artificial Sequence: Synthetic oligonucleotide
aaaaacctgaaggaagataat

SEQ ID NO: 27576 - RNA, 21 nt, synthetic construct
  source 1..21: mol_type = other RNA; note = Description of Artificial Sequence: Synthetic oligonucleotide
taaaaacctgaaggaagataa

SEQ ID NO: 27577 - RNA, 21 nt, synthetic construct
  source 1..21: mol_type = other RNA; note = Description of Artificial Sequence: Synthetic oligonucleotide
gtaaaaacctgaaggaagata

SEQ ID NO: 27578 - RNA, 21 nt, synthetic construct
  source 1..21: mol_type = other RNA; note = Description of Artificial Sequence: Synthetic oligonucleotide
ggtaaaaacctgaaggaagat

SEQ ID NO: 27579 - RNA, 21 nt, synthetic construct
  source 1..21: mol_type = other RNA; note = Description of Artificial Sequence: Synthetic oligonucleotide
aggtaaaaacctgaaggaaga

SEQ ID NO: 27580 - RNA, 21 nt, synthetic construct
  source 1..21: mol_type = other RNA; note = Description of Artificial Sequence: Synthetic oligonucleotide
gaggtaaaaacctgaaggaag

SEQ ID NO: 27581 - RNA, 21 nt, synthetic construct
  source 1..21: mol_type = other RNA; note = Description of Artificial Sequence: Synthetic oligonucleotide
ggaggtaaaaacctgaaggaa

SEQ ID NO: 27582 - RNA, 21 nt, synthetic construct
  source 1..21: mol_type = other RNA; note = Description of Artificial Sequence: Synthetic oligonucleotide
tggaggtaaaaacctgaagga

SEQ ID NO: 27583 - RNA, 21 nt, synthetic construct
  source 1..21: mol_type = other RNA; note = Description of Artificial Sequence: Synthetic oligonucleotide
gtggaggtaaaaacctgaagg

SEQ ID NO: 27584 - RNA, 21 nt, synthetic construct
  source 1..21: mol_type = other RNA; note = Description of Artificial Sequence: Synthetic oligonucleotide
agtggaggtaaaaacctgaag

SEQ ID NO: 27585 - RNA, 21 nt, synthetic construct
  source 1..21: mol_type = other RNA; note = Description of Artificial Sequence: Synthetic oligonucleotide
gagtggaggtaaaaacctgaa

SEQ ID NO: 27586 - RNA, 21 nt, synthetic construct
  source 1..21: mol_type = other RNA; note = Description of Artificial Sequence: Synthetic oligonucleotide
tgagtggaggtaaaaacctga

SEQ ID NO: 27587 - RNA, 21 nt, synthetic construct
  source 1..21: mol_type = other RNA; note = Description of Artificial Sequence: Synthetic oligonucleotide
atgagtggaggtaaaaacctg

SEQ ID NO: 27588 - RNA, 21 nt, synthetic construct
  source 1..21: mol_type = other RNA; note = Description of Artificial Sequence: Synthetic oligonucleotide
gatgagtggaggtaaaaacct

SEQ ID NO: 27589 - RNA, 21 nt, synthetic construct
  source 1..21: mol_type = other RNA; note = Description of Artificial Sequence: Synthetic oligonucleotide
ggatgagtggaggtaaaaacc

SEQ ID NO: 27590 - RNA, 21 nt, synthetic construct
  source 1..21: mol_type = other RNA; note = Description of Artificial Sequence: Synthetic oligonucleotide
aggatgagtggaggtaaaaac

SEQ ID NO: 27591 - RNA, 21 nt, synthetic construct
  source 1..21: mol_type = other RNA; note = Description of Artificial Sequence: Synthetic oligonucleotide
aaggatgagtggaggtaaaaa

SEQ ID NO: 27592 - RNA, 21 nt, synthetic construct
  source 1..21: mol_type = other RNA; note = Description of Artificial Sequence: Synthetic oligonucleotide
taaggatgagtggaggtaaaa

SEQ ID NO: 27593 - RNA, 21 nt, synthetic construct
  source 1..21: mol_type = other RNA; note = Description of Artificial Sequence: Synthetic oligonucleotide
ctaaggatgagtggaggtaaa

SEQ ID NO: 27594 - RNA, 21 nt, synthetic construct
  source 1..21: mol_type = other RNA; note = Description of Artificial Sequence: Synthetic oligonucleotide
tctaaggatgagtggaggtaa

SEQ ID NO: 27595 - RNA, 21 nt, synthetic construct
  source 1..21: mol_type = other RNA; note = Description of Artificial Sequence: Synthetic oligonucleotide
ctctaaggatgagtggaggta

SEQ ID NO: 27596 - RNA, 21 nt, synthetic construct
  source 1..21: mol_type = other RNA; note = Description of Artificial Sequence: Synthetic oligonucleotide
gctctaaggatgagtggaggt

SEQ ID NO: 27597 - RNA, 21 nt, synthetic construct
  source 1..21: mol_type = other RNA; note = Description of Artificial Sequence: Synthetic oligonucleotide
ggctctaaggatgagtggagg

SEQ ID NO: 27598 - RNA, 21 nt, synthetic construct
  source 1..21: mol_type = other RNA; note = Description of Artificial Sequence: Synthetic oligonucleotide
gggctctaaggatgagtggag

SEQ ID NO: 27599 - RNA, 21 nt, synthetic construct
  source 1..21: mol_type = other RNA; note = Description of Artificial Sequence: Synthetic oligonucleotide
tgggctctaaggatgagtgga

SEQ ID NO: 27600 - RNA, 21 nt, synthetic construct
  source 1..21: mol_type = other RNA; note = Description of Artificial Sequence: Synthetic oligonucleotide
gtgggctctaaggatgagtgg

SEQ ID NO: 27601 - RNA, 21 nt, synthetic construct
  source 1..21: mol_type = other RNA; note = Description of Artificial Sequence: Synthetic oligonucleotide
agtgggctctaaggatgagtg

SEQ ID NO: 27602 - RNA, 21 nt, synthetic construct
  source 1..21: mol_type = other RNA; note = Description of Artificial Sequence: Synthetic oligonucleotide
cagtgggctctaaggatgagt

SEQ ID NO: 27603 - RNA, 21 nt, synthetic construct
  source 1..21: mol_type = other RNA; note = Description of Artificial Sequence: Synthetic oligonucleotide
tcagtgggctctaaggatgag

SEQ ID NO: 27604 - RNA, 21 nt, synthetic construct
  source 1..21: mol_type = other RNA; note = Description of Artificial Sequence: Synthetic oligonucleotide
gtcagtgggctctaaggatga

SEQ ID NO: 27605 - RNA, 21 nt, synthetic construct
  source 1..21: mol_type = other RNA; note = Description of Artificial Sequence: Synthetic oligonucleotide
agtcagtgggctctaaggatg

SEQ ID NO: 27606 - RNA, 21 nt, synthetic construct
  source 1..21: mol_type = other RNA; note = Description of Artificial Sequence: Synthetic oligonucleotide
cagtcagtgggctctaaggat

SEQ ID NO: 27607 - RNA, 21 nt, synthetic construct
  source 1..21: mol_type = other RNA; note = Description of Artificial Sequence: Synthetic oligonucleotide
gcagtcagtgggctctaagga

SEQ ID NO: 27608 - RNA, 21 nt, synthetic construct
  source 1..21: mol_type = other RNA; note = Description of Artificial Sequence: Synthetic oligonucleotide
agcagtcagtgggctctaagg

SEQ ID NO: 27609 - RNA, 21 nt, synthetic construct
  source 1..21: mol_type = other RNA; note = Description of Artificial Sequence: Synthetic oligonucleotide
gagcagtcagtgggctctaag

SEQ ID NO: 27610 - RNA, 21 nt, synthetic construct
  source 1..21: mol_type = other RNA; note = Description of Artificial Sequence: Synthetic oligonucleotide
ggagcagtcagtgggctctaa

SEQ ID NO: 27611 - RNA, 21 nt, synthetic construct
  source 1..21: mol_type = other RNA; note = Description of Artificial Sequence: Synthetic oligonucleotide
gggagcagtcagtgggctcta

SEQ ID NO: 27612 - RNA, 21 nt, synthetic construct
  source 1..21: mol_type = other RNA; note = Description of Artificial Sequence: Synthetic oligonucleotide
ggggagcagtcagtgggctct

SEQ ID NO: 27613 - RNA, 21 nt, synthetic construct
  source 1..21: mol_type = other RNA; note = Description of Artificial Sequence: Synthetic oligonucleotide
aggggagcagtcagtgggctc

SEQ ID NO: 27614 - RNA, 21 nt, synthetic construct
  source 1..21: mol_type = other RNA; note = Description of Artificial Sequence: Synthetic oligonucleotide
aaggggagcagtcagtgggct

SEQ ID NO: 27615 - RNA, 21 nt, synthetic construct
  source 1..21: mol_type = other RNA; note = Description of Artificial Sequence: Synthetic oligonucleotide
aaaggggagcagtcagtgggc

SEQ ID NO: 27616 - RNA, 21 nt, synthetic construct
  source 1..21: mol_type = other RNA; note = Description of Artificial Sequence: Synthetic oligonucleotide
taaaggggagcagtcagtggg

SEQ ID NO: 27617 - RNA, 21 nt, synthetic construct
  source 1..21: mol_type = other RNA; note = Description of Artificial Sequence: Synthetic oligonucleotide
ataaaggggagcagtcagtgg

SEQ ID NO: 27618 - RNA, 21 nt, synthetic construct
  source 1..21: mol_type = other RNA; note = Description of Artificial Sequence: Synthetic oligonucleotide
tataaaggggagcagtcagtg

SEQ ID NO: 27619 - RNA, 21 nt, synthetic construct
  source 1..21: mol_type = other RNA; note = Description of Artificial Sequence: Synthetic oligonucleotide
gtataaaggggagcagtcagt

SEQ ID NO: 27620 - RNA, 21 nt, synthetic construct
  source 1..21: mol_type = other RNA; note = Description of Artificial Sequence: Synthetic oligonucleotide
ggtataaaggggagcagtcag

SEQ ID NO: 27621 - RNA, 21 nt, synthetic construct
  source 1..21: mol_type = other RNA; note = Description of Artificial Sequence: Synthetic oligonucleotide
aggtataaaggggagcagtca

SEQ ID NO: 27622 - RNA, 21 nt, synthetic construct
  source 1..21: mol_type = other RNA; note = Description of Artificial Sequence: Synthetic oligonucleotide
caggtataaaggggagcagtc

SEQ ID NO: 27623 - RNA, 21 nt, synthetic construct
  source 1..21: mol_type = other RNA; note = Description of Artificial Sequence: Synthetic oligonucleotide
acaggtataaaggggagcagt

SEQ ID NO: 27624 - RNA, 21 nt, synthetic construct
  source 1..21: mol_type = other RNA; note = Description of Artificial Sequence: Synthetic oligonucleotide
aacaggtataaaggggagcag

SEQ ID NO: 27625 - RNA, 21 nt, synthetic construct
  source 1..21: mol_type = other RNA; note = Description of Artificial Sequence: Synthetic oligonucleotide
caacaggtataaaggggagca

SEQ ID NO: 27626 - RNA, 21 nt, synthetic construct
  source 1..21: mol_type = other RNA; note = Description of Artificial Sequence: Synthetic oligonucleotide
ccaacaggtataaaggggagc

SEQ ID NO: 27627 - RNA, 21 nt, synthetic construct
  source 1..21: mol_type = other RNA; note = Description of Artificial Sequence: Synthetic oligonucleotide
gccaacaggtataaaggggag

SEQ ID NO: 27628 - RNA, 21 nt, synthetic construct
  source 1..21: mol_type = other RNA; note = Description of Artificial Sequence: Synthetic oligonucleotide
ggccaacaggtataaagggga

SEQ ID NO: 27629 - RNA, 21 nt, synthetic construct
  source 1..21: mol_type = other RNA; note = Description of Artificial Sequence: Synthetic oligonucleotide
gggccaacaggtataaagggg

SEQ ID NO: 27630 - RNA, 21 nt, synthetic construct
  source 1..21: mol_type = other RNA; note = Description of Artificial Sequence: Synthetic oligonucleotide
agggccaacaggtataaaggg

SEQ ID NO: 27631 - RNA, 21 nt, synthetic construct
  source 1..21: mol_type = other RNA; note = Description of Artificial Sequence: Synthetic oligonucleotide
cagggccaacaggtataaagg

SEQ ID NO: 27632 - RNA, 21 nt, synthetic construct
  source 1..21: mol_type = other RNA; note = Description of Artificial Sequence: Synthetic oligonucleotide
gcagggccaacaggtataaag

SEQ ID NO: 27633 - RNA, 21 nt, synthetic construct
  source 1..21: mol_type = other RNA; note = Description of Artificial Sequence: Synthetic oligonucleotide
ggcagggccaacaggtataaa

SEQ ID NO: 27634 - RNA, 21 nt, synthetic construct
  source 1..21: mol_type = other RNA; note = Description of Artificial Sequence: Synthetic oligonucleotide
aggcagggccaacaggtataa

SEQ ID NO: 27635 - RNA, 21 nt, synthetic construct
  source 1..21: mol_type = other RNA; note = Description of Artificial Sequence: Synthetic oligonucleotide
taggcagggccaacaggtata

SEQ ID NO: 27636 - RNA, 21 nt, synthetic construct
  source 1..21: mol_type = other RNA; note = Description of Artificial Sequence: Synthetic oligonucleotide
ataggcagggccaacaggtat

SEQ ID NO: 27637 - RNA, 21 nt, synthetic construct
  source 1..21: mol_type = other RNA; note = Description of Artificial Sequence: Synthetic oligonucleotide
tataggcagggccaacaggta

SEQ ID NO: 27638 - RNA, 21 nt, synthetic construct
  source 1..21: mol_type = other RNA; note = Description of Artificial Sequence: Synthetic oligonucleotide
ctataggcagggccaacaggt

SEQ ID NO: 27639 - RNA, 21 nt, synthetic construct
  source 1..21: mol_type = other RNA; note = Description of Artificial Sequence: Synthetic oligonucleotide
cctataggcagggccaacagg

SEQ ID NO: 27640 - RNA, 21 nt, synthetic construct
  source 1..21: mol_type = other RNA; note = Description of Artificial Sequence: Synthetic oligonucleotide
tcctataggcagggccaacag

SEQ ID NO: 27641 - RNA, 21 nt, synthetic construct
  source 1..21: mol_type = other RNA; note = Description of Artificial Sequence: Synthetic oligonucleotide
ctcctataggcagggccaaca

SEQ ID NO: 27642 - RNA, 21 nt, synthetic construct
  source 1..21: mol_type = other RNA; note = Description of Artificial Sequence: Synthetic oligonucleotide
tctcctataggcagggccaac

SEQ ID NO: 27643 - RNA, 21 nt, synthetic construct
  source 1..21: mol_type = other RNA; note = Description of Artificial Sequence: Synthetic oligonucleotide
ctctcctataggcagggccaa

SEQ ID NO: 27644 - RNA, 21 nt, synthetic construct
  source 1..21: mol_type = other RNA; note = Description of Artificial Sequence: Synthetic oligonucleotide
tctctcctataggcagggcca

SEQ ID NO: 27645 - RNA, 21 nt, synthetic construct
  source 1..21: mol_type = other RNA; note = Description of Artificial Sequence: Synthetic oligonucleotide
ttctctcctataggcagggcc

SEQ ID NO: 27646 - RNA, 21 nt, synthetic construct
  source 1..21: mol_type = other RNA; note = Description of Artificial Sequence: Synthetic oligonucleotide
attctctcctataggcagggc

SEQ ID NO: 27647 - RNA, 21 nt, synthetic construct
  source 1..21: mol_type = other RNA; note = Description of Artificial Sequence: Synthetic oligonucleotide
tattctctcctataggcaggg

SEQ ID NO: 27648 - RNA, 21 nt, synthetic construct
  source 1..21: mol_type = other RNA; note = Description of Artificial Sequence: Synthetic oligonucleotide
atattctctcctataggcagg

SEQ ID NO: 27649 - RNA, 21 nt, synthetic construct
  source 1..21: mol_type = other RNA; note = Description of Artificial Sequence: Synthetic oligonucleotide
aatattctctcctataggcag

SEQ ID NO: 27650 - RNA, 21 nt, synthetic construct
  source 1..21: mol_type = other RNA; note = Description of Artificial Sequence: Synthetic oligonucleotide
aaatattctctcctataggca

SEQ ID NO: 27651 - RNA, 21 nt, synthetic construct
  source 1..21: mol_type = other RNA; note = Description of Artificial Sequence: Synthetic oligonucleotide
caaatattctctcctataggc

SEQ ID NO: 27652 - RNA, 21 nt, synthetic construct
  source 1..21: mol_type = other RNA; note = Description of Artificial Sequence: Synthetic oligonucleotide
ccaaatattctctcctatagg

SEQ ID NO: 27653 - RNA, 21 nt, synthetic construct
  source 1..21: mol_type = other RNA; note = Description of Artificial Sequence: Synthetic oligonucleotide
tccaaatattctctcctatag

SEQ ID NO: 27654 - RNA, 21 nt, synthetic construct
  source 1..21: mol_type = other RNA; note = Description of Artificial Sequence: Synthetic oligonucleotide
ctccaaatattctctcctata

SEQ ID NO: 27655 - RNA, 21 nt, synthetic construct
  source 1..21: mol_type = other RNA; note = Description of Artificial Sequence: Synthetic oligonucleotide
tctccaaatattctctcctat

SEQ ID NO: 27656 - RNA, 21 nt, synthetic construct
  source 1..21: mol_type = other RNA; note = Description of Artificial Sequence: Synthetic oligonucleotide
atctccaaatattctctccta

SEQ ID NO: 27657 - RNA, 21 nt, synthetic construct
  source 1..21: mol_type = other RNA; note = Description of Artificial Sequence: Synthetic oligonucleotide
tatctccaaatattctctcct

SEQ ID NO: 27658 - RNA, 21 nt, synthetic construct
  source 1..21: mol_type = other RNA; note = Description of Artificial Sequence: Synthetic oligonucleotide
ctatctccaaatattctctcc

SEQ ID NO: 27659 - RNA, 21 nt, synthetic construct
  source 1..21: mol_type = other RNA; note = Description of Artificial Sequence: Synthetic oligonucleotide
cctatctccaaatattctctc

SEQ ID NO: 27660 - RNA, 21 nt, synthetic construct
  source 1..21: mol_type = other RNA; note = Description of Artificial Sequence: Synthetic oligonucleotide
gcctatctccaaatattctct

SEQ ID NO: 27661 - RNA, 21 nt, synthetic construct
  source 1..21: mol_type = other RNA; note = Description of Artificial Sequence: Synthetic oligonucleotide
tgcctatctccaaatattctc

SEQ ID NO: 27662 - RNA, 21 nt, synthetic construct
  source 1..21: mol_type = other RNA; note = Description of Artificial Sequence: Synthetic oligonucleotide
ctgcctatctccaaatattct

SEQ ID NO: 27663 - RNA, 21 nt, synthetic construct
  source 1..21: mol_type = other RNA; note = Description of Artificial Sequence: Synthetic oligonucleotide
gctgcctatctccaaatattc

SEQ ID NO: 27664 - RNA, 21 nt, synthetic construct
  source 1..21: mol_type = other RNA; note = Description of Artificial Sequence: Synthetic oligonucleotide
agctgcctatctccaaatatt

SEQ ID NO: 27665 - RNA, 21 nt, synthetic construct
  source 1..21: mol_type = other RNA; note = Description of Artificial Sequence: Synthetic oligonucleotide
aagctgcctatctccaaatat

SEQ ID NO: 27666 - RNA, 21 nt, synthetic construct
  source 1..21: mol_type = other RNA; note = Description of Artificial Sequence: Synthetic oligonucleotide
gaagctgcctatctccaaata

SEQ ID NO: 27667 - RNA, 21 nt, synthetic construct
  source 1..21: mol_type = other RNA; note = Description of Artificial Sequence: Synthetic oligonucleotide
tgaagctgcctatctccaaat

SEQ ID NO: 27668 - RNA, 21 nt, synthetic construct
  source 1..21: mol_type = other RNA; note = Description of Artificial Sequence: Synthetic oligonucleotide
ctgaagctgcctatctccaaa

SEQ ID NO: 27669 - RNA, 21 nt, synthetic construct
  source 1..21: mol_type = other RNA; note = Description of Artificial Sequence: Synthetic oligonucleotide
cctgaagctgcctatctccaa

SEQ ID NO: 27670 - RNA, 21 nt, synthetic construct
  source 1..21: mol_type = other RNA; note = Description of Artificial Sequence: Synthetic oligonucleotide
tcctgaagctgcctatctcca

SEQ ID NO: 27671 - RNA, 21 nt, synthetic construct
  source 1..21: mol_type = other RNA; note = Description of Artificial Sequence: Synthetic oligonucleotide
atcctgaagctgcctatctcc

SEQ ID NO: 27672 - RNA, 21 nt, synthetic construct
  source 1..21: mol_type = other RNA; note = Description of Artificial Sequence: Synthetic oligonucleotide
catcctgaagctgcctatctc

SEQ ID NO: 27673 - RNA, 21 nt, synthetic construct
  source 1..21: mol_type = other RNA; note = Description of Artificial Sequence: Synthetic oligonucleotide
gcatcctgaagctgcctatct

SEQ ID NO: 27674 - RNA, 21 nt, synthetic construct
  source 1..21: mol_type = other RNA; note = Description of Artificial Sequence: Synthetic oligonucleotide
tgcatcctgaagctgcctatc

SEQ ID NO: 27675 - RNA, 21 nt, synthetic construct
  source 1..21: mol_type = other RNA; note = Description of Artificial Sequence: Synthetic oligonucleotide
atgcatcctgaagctgcctat

SEQ ID NO: 27676 - RNA, 21 nt, synthetic construct
  source 1..21: mol_type = other RNA; note = Description of Artificial Sequence: Synthetic oligonucleotide
aatgcatcctgaagctgccta

SEQ ID NO: 27677 - RNA, 21 nt, synthetic construct
  source 1..21: mol_type = other RNA; note = Description of Artificial Sequence: Synthetic oligonucleotide
caatgcatcctgaagctgcct

SEQ ID NO: 27678 - RNA, 21 nt, synthetic construct
  source 1..21: mol_type = other RNA; note = Description of Artificial Sequence: Synthetic oligonucleotide
gcaatgcatcctgaagctgcc

SEQ ID NO: 27679 - RNA, 21 nt, synthetic construct
  source 1..21: mol_type = other RNA; note = Description of Artificial Sequence: Synthetic oligonucleotide
tgcaatgcatcctgaagctgc

SEQ ID NO: 27680 - RNA, 21 nt, synthetic construct
  source 1..21: mol_type = other RNA; note = Description of Artificial Sequence: Synthetic oligonucleotide
ttgcaatgcatcctgaagctg

SEQ ID NO: 27681 - RNA, 21 nt, synthetic construct
  source 1..21: mol_type = other RNA; note = Description of Artificial Sequence: Synthetic oligonucleotide
attgcaatgcatcctgaagct

SEQ ID NO: 27682 - RNA, 21 nt, synthetic construct
  source 1..21: mol_type = other RNA; note = Description of Artificial Sequence: Synthetic oligonucleotide
gattgcaatgcatcctgaagc

SEQ ID NO: 27683 - RNA, 21 nt, synthetic construct
  source 1..21: mol_type = other RNA; note = Description of Artificial Sequence: Synthetic oligonucleotide
tgattgcaatgcatcctgaag

SEQ ID NO: 27684 - RNA, 21 nt, synthetic construct
  source 1..21: mol_type = other RNA; note = Description of Artificial Sequence: Synthetic oligonucleotide
atgattgcaatgcatcctgaa

SEQ ID NO: 27685 - RNA, 21 nt, synthetic construct
  source 1..21: mol_type = other RNA; note = Description of Artificial Sequence: Synthetic oligonucleotide
gatgattgcaatgcatcctga

SEQ ID NO: 27686 - RNA, 21 nt, synthetic construct
  source 1..21: mol_type = other RNA; note = Description of Artificial Sequence: Synthetic oligonucleotide
ggatgattgcaatgcatcctg

SEQ ID NO: 27687 - RNA, 21 nt, synthetic construct
  source 1..21: mol_type = other RNA; note = Description of Artificial Sequence: Synthetic oligonucleotide
aggatgattgcaatgcatcct

SEQ ID NO: 27688 - RNA, 21 nt, synthetic construct
  source 1..21: mol_type = other RNA; note = Description of Artificial Sequence: Synthetic oligonucleotide
aaggatgattgcaatgcatcc

SEQ ID NO: 27689 - RNA, 21 nt, synthetic construct
  source 1..21: mol_type = other RNA; note = Description of Artificial Sequence: Synthetic oligonucleotide
aaaggatgattgcaatgcatc

SEQ ID NO: 27690 - RNA, 21 nt, synthetic construct
  source 1..21: mol_type = other RNA; note = Description of Artificial Sequence: Synthetic oligonucleotide
aaaaggatgattgcaatgcat

SEQ ID NO: 27691 - RNA, 21 nt, synthetic construct
  source 1..21: mol_type = other RNA; note = Description of Artificial Sequence: Synthetic oligonucleotide
gaaaaggatgattgcaatgca

SEQ ID NO: 27692 - RNA, 21 nt, synthetic construct
  source 1..21: mol_type = other RNA; note = Description of Artificial Sequence: Synthetic oligonucleotide
agaaaaggatgattgcaatgc

SEQ ID NO: 27693 - RNA, 21 nt, synthetic construct
  source 1..21: mol_type = other RNA; note = Description of Artificial Sequence: Synthetic oligonucleotide
aagaaaaggatgattgcaatg

SEQ ID NO: 27694 - RNA, 21 nt, synthetic construct
  source 1..21: mol_type = other RNA; note = Description of Artificial Sequence: Synthetic oligonucleotide
taagaaaaggatgattgcaat

SEQ ID NO: 27695 - RNA, 21 nt, synthetic construct
  source 1..21: mol_type = other RNA; note = Description of Artificial Sequence: Synthetic oligonucleotide
ttaagaaaaggatgattgcaa

SEQ ID NO: 27696 - RNA, 21 nt, synthetic construct
  source 1..21: mol_type = other RNA; note = Description of Artificial Sequence: Synthetic oligonucleotide
tttaagaaaaggatgattgca

SEQ ID NO: 27697 - RNA, 21 nt, synthetic construct
  source 1..21: mol_type = other RNA; note = Description of Artificial Sequence: Synthetic oligonucleotide
atttaagaaaaggatgattgc

SEQ ID NO: 27698 - RNA, 21 nt, synthetic construct
  source 1..21: mol_type = other RNA; note = Description of Artificial Sequence: Synthetic oligonucleotide
aatttaagaaaaggatgattg

SEQ ID NO: 27699 - RNA, 21 nt, synthetic construct
  source 1..21: mol_type = other RNA; note = Description of Artificial Sequence: Synthetic oligonucleotide
taatttaagaaaaggatgatt

SEQ ID NO: 27700 - RNA, 21 nt, synthetic construct
  source 1..21: mol_type = other RNA; note = Description of Artificial Sequence: Synthetic oligonucleotide
ataatttaagaaaaggatgat

SEQ ID NO: 27701 - RNA, 21 nt, synthetic construct
  source 1..21: mol_type = other RNA; note = Description of Artificial Sequence: Synthetic oligonucleotide
cataatttaagaaaaggatga

SEQ ID NO: 27702 - RNA, 21 nt, synthetic construct
  source 1..21: mol_type = other RNA; note = Description of Artificial Sequence: Synthetic oligonucleotide
acataatttaagaaaaggatg

SEQ ID NO: 27703 - RNA, 21 nt, synthetic construct
  source 1..21: mol_type = other RNA; note = Description of Artificial Sequence: Synthetic oligonucleotide
gacataatttaagaaaaggat

SEQ ID NO: 27704 - RNA, 21 nt, synthetic construct
  source 1..21: mol_type = other RNA; note = Description of Artificial Sequence: Synthetic oligonucleotide
tgacataatttaagaaaagga

SEQ ID NO: 27705 - RNA, 21 nt, synthetic construct
  source 1..21: mol_type = other RNA; note = Description of Artificial Sequence: Synthetic oligonucleotide
gtgacataatttaagaaaagg

SEQ ID NO: 27706 - RNA, 21 nt, synthetic construct
  source 1..21: mol_type = other RNA; note = Description of Artificial Sequence: Synthetic oligonucleotide
agtgacataatttaagaaaag

SEQ ID NO: 27707 - RNA, 21 nt, synthetic construct
  source 1..21: mol_type = other RNA; note = Description of Artificial Sequence: Synthetic oligonucleotide
tagtgacataatttaagaaaa

SEQ ID NO: 27708 - RNA, 21 nt, synthetic construct
  source 1..21: mol_type = other RNA; note = Description of Artificial Sequence: Synthetic oligonucleotide
ctagtgacataatttaagaaa

SEQ ID NO: 27709 - RNA, 21 nt, synthetic construct
  source 1..21: mol_type = other RNA; note = Description of Artificial Sequence: Synthetic oligonucleotide
actagtgacataatttaagaa

SEQ ID NO: 27710 - RNA, 21 nt, synthetic construct
  source 1..21: mol_type = other RNA; note = Description of Artificial Sequence: Synthetic oligonucleotide
gactagtgacataatttaaga

SEQ ID NO: 27711 - RNA, 21 nt, synthetic construct
  source 1..21: mol_type = other RNA; note = Description of Artificial Sequence: Synthetic oligonucleotide
agactagtgacataatttaag

SEQ ID NO: 27712 - RNA, 21 nt, synthetic construct
  source 1..21: mol_type = other RNA; note = Description of Artificial Sequence: Synthetic oligonucleotide
aagactagtgacataatttaa

SEQ ID NO: 27713 - RNA, 21 nt, synthetic construct
  source 1..21: mol_type = other RNA; note = Description of Artificial Sequence: Synthetic oligonucleotide
aaagactagtgacataattta

SEQ ID NO: 27714 - RNA, 21 nt, synthetic construct
  source 1..21: mol_type = other RNA; note = Description of Artificial Sequence: Synthetic oligonucleotide
aaaagactagtgacataattt

SEQ ID NO: 27715 - RNA, 21 nt, synthetic construct
  source 1..21: mol_type = other RNA; note = Description of Artificial Sequence: Synthetic oligonucleotide
taaaagactagtgacataatt

SEQ ID NO: 27716 - RNA, 21 nt, synthetic construct
  source 1..21: mol_type = other RNA; note = Description of Artificial Sequence: Synthetic oligonucleotide
ataaaagactagtgacataat

SEQ ID NO: 27717 - RNA, 21 nt, synthetic construct
  source 1..21: mol_type = other RNA; note = Description of Artificial Sequence: Synthetic oligonucleotide
aataaaagactagtgacataa

SEQ ID NO: 27718 - RNA, 21 nt, synthetic construct
  source 1..21: mol_type = other RNA; note = Description of Artificial Sequence: Synthetic oligonucleotide
aaataaaagactagtgacata

SEQ ID NO: 27719 - RNA, 21 nt, synthetic construct
  source 1..21: mol_type = other RNA; note = Description of Artificial Sequence: Synthetic oligonucleotide
aaaataaaagactagtgacat

SEQ ID NO: 27720 - RNA, 21 nt, synthetic construct
  source 1..21: mol_type = other RNA; note = Description of Artificial Sequence: Synthetic oligonucleotide
aaaaataaaagactagtgaca

SEQ ID NO: 27721 - RNA, 21 nt, synthetic construct
  source 1..21: mol_type = other RNA; note = Description of Artificial Sequence: Synthetic oligonucleotide
aaaaaataaaagactagtgac

SEQ ID NO: 27722 - RNA, 21 nt, synthetic construct
  source 1..21: mol_type = other RNA; note = Description of Artificial Sequence: Synthetic oligonucleotide
gaaaaaataaaagactagtga

SEQ ID NO: 27723 - RNA, 21 nt, synthetic construct
  source 1..21: mol_type = other RNA; note = Description of Artificial Sequence: Synthetic oligonucleotide
ggaaaaaataaaagactagtg

SEQ ID NO: 27724 - RNA, 21 nt, synthetic construct
  source 1..21: mol_type = other RNA; note = Description of Artificial Sequence: Synthetic oligonucleotide
gggaaaaaataaaagactagt

SEQ ID NO: 27725 - RNA, 21 nt, synthetic construct
  source 1..21: mol_type = other RNA; note = Description of Artificial Sequence: Synthetic oligonucleotide
ggggaaaaaataaaagactag

SEQ ID NO: 27726 - RNA, 21 nt, synthetic construct
  source 1..21: mol_type = other RNA; note = Description of Artificial Sequence: Synthetic oligonucleotide
aggggaaaaaataaaagacta

SEQ ID NO: 27727 - RNA, 21 nt, synthetic construct
  source 1..21: mol_type = other RNA; note = Description of Artificial Sequence: Synthetic oligonucleotide
gaggggaaaaaataaaagact

SEQ ID NO: 27728 - RNA, 21 nt, synthetic construct
  source 1..21: mol_type = other RNA; note = Description of Artificial Sequence: Synthetic oligonucleotide
agaggggaaaaaataaaagac

SEQ ID NO: 27729 - RNA, 21 nt, synthetic construct
  source 1..21: mol_type = other RNA; note = Description of Artificial Sequence: Synthetic oligonucleotide
aagaggggaaaaaataaaaga

SEQ ID NO: 27730 - RNA, 21 nt, synthetic construct
  source 1..21: mol_type = other RNA; note = Description of Artificial Sequence: Synthetic oligonucleotide
caagaggggaaaaaataaaag

SEQ ID NO: 27731 - RNA, 21 nt, synthetic construct
  source 1..21: mol_type = other RNA; note = Description of Artificial Sequence: Synthetic oligonucleotide
tcaagaggggaaaaaataaaa

SEQ ID NO: 27732 - RNA, 21 nt, synthetic construct
  source 1..21: mol_type = other RNA; note = Description of Artificial Sequence: Synthetic oligonucleotide
ttcaagaggggaaaaaataaa

SEQ ID NO: 27733 - RNA, 21 nt, synthetic construct
  source 1..21: mol_type = other RNA; note = Description of Artificial Sequence: Synthetic oligonucleotide
gttcaagaggggaaaaaataa

SEQ ID NO: 27734 - RNA, 21 nt, synthetic construct
  source 1..21: mol_type = other RNA; note = Description of Artificial Sequence: Synthetic oligonucleotide
agttcaagaggggaaaaaata

SEQ ID NO: 27735 - RNA, 21 nt, synthetic construct
  source 1..21: mol_type = other RNA; note = Description of Artificial Sequence: Synthetic oligonucleotide
aagttcaagaggggaaaaaat

SEQ ID NO: 27736 - RNA, 21 nt, synthetic construct
  source 1..21: mol_type = other RNA; note = Description of Artificial Sequence: Synthetic oligonucleotide
aaagttcaagaggggaaaaaa

SEQ ID NO: 27737 - RNA, 21 nt, synthetic construct
  source 1..21: mol_type = other RNA; note = Description of Artificial Sequence: Synthetic oligonucleotide
gaaagttcaagaggggaaaaa

SEQ ID NO: 27738 - RNA, 21 nt, synthetic construct
  source 1..21: mol_type = other RNA; note = Description of Artificial Sequence: Synthetic oligonucleotide
ggaaagttcaagaggggaaaa

SEQ ID NO: 27739 - RNA, 21 nt, synthetic construct
  source 1..21: mol_type = other RNA; note = Description of Artificial Sequence: Synthetic oligonucleotide
aggaaagttcaagaggggaaa

SEQ ID NO: 27740 - RNA, 21 nt, synthetic construct
  source 1..21: mol_type = other RNA; note = Description of Artificial Sequence: Synthetic oligonucleotide
gaggaaagttcaagaggggaa

SEQ ID NO: 27741 - RNA, 21 nt, synthetic construct
  source 1..21: mol_type = other RNA; note = Description of Artificial Sequence: Synthetic oligonucleotide
tgaggaaagttcaagagggga

SEQ ID NO: 27742 - RNA, 21 nt, synthetic construct
  source 1..21: mol_type = other RNA; note = Description of Artificial Sequence: Synthetic oligonucleotide
gtgaggaaagttcaagagggg

SEQ ID NO: 27743 - RNA, 21 nt, synthetic construct
  source 1..21: mol_type = other RNA; note = Description of Artificial Sequence: Synthetic oligonucleotide
tgtgaggaaagttcaagaggg

SEQ ID NO: 27744 - RNA, 21 nt, synthetic construct
  source 1..21: mol_type = other RNA; note = Description of Artificial Sequence: Synthetic oligonucleotide
gtgtgaggaaagttcaagagg

SEQ ID NO: 27745 - RNA, 21 nt, synthetic construct
  source 1..21: mol_type = other RNA; note = Description of Artificial Sequence: Synthetic oligonucleotide
ggtgtgaggaaagttcaagag

SEQ ID NO: 27746 - RNA, 21 nt, synthetic construct
  source 1..21: mol_type = other RNA; note = Description of Artificial Sequence: Synthetic oligonucleotide
aggtgtgaggaaagttcaaga

SEQ ID NO: 27747 - RNA, 21 nt, synthetic construct
  source 1..21: mol_type = other RNA; note = Description of Artificial Sequence: Synthetic oligonucleotide
caggtgtgaggaaagttcaag

SEQ ID NO: 27748 - RNA, 21 nt, synthetic construct
  source 1..21: mol_type = other RNA; note = Description of Artificial Sequence: Synthetic oligonucleotide
ccaggtgtgaggaaagttcaa

SEQ ID NO: 27749 - RNA, 21 nt, synthetic construct
  source 1..21: mol_type = other RNA; note = Description of Artificial Sequence: Synthetic oligonucleotide
tccaggtgtgaggaaagttca

SEQ ID NO: 27750 - RNA, 21 nt, synthetic construct
  source 1..21: mol_type = other RNA; note = Description of Artificial Sequence: Synthetic oligonucleotide
ttccaggtgtgaggaaagttc

SEQ ID NO: 27751 - RNA, 21 nt, synthetic construct
  source 1..21: mol_type = other RNA; note = Description of Artificial Sequence: Synthetic oligonucleotide
cttccaggtgtgaggaaagtt

SEQ ID NO: 27752 - RNA, 21 nt, synthetic construct
  source 1..21: mol_type = other RNA; note = Description of Artificial Sequence: Synthetic oligonucleotide
tcttccaggtgtgaggaaagt

SEQ ID NO: 27753 - RNA, 21 nt, synthetic construct
  source 1..21: mol_type = other RNA; note = Description of Artificial Sequence: Synthetic oligonucleotide
ttcttccaggtgtgaggaaag

SEQ ID NO: 27754 - RNA, 21 nt, synthetic construct
  source 1..21: mol_type = other RNA; note = Description of Artificial Sequence: Synthetic oligonucleotide
tttcttccaggtgtgaggaaa

SEQ ID NO: 27755 - RNA, 21 nt, synthetic construct
  source 1..21: mol_type = other RNA; note = Description of Artificial Sequence: Synthetic oligonucleotide
gtttcttccaggtgtgaggaa

SEQ ID NO: 27756 - RNA, 21 nt, synthetic construct
  source 1..21: mol_type = other RNA; note = Description of Artificial Sequence: Synthetic oligonucleotide
tgtttcttccaggtgtgagga

SEQ ID NO: 27757 - RNA, 21 nt, synthetic construct
  source 1..21: mol_type = other RNA; note = Description of Artificial Sequence: Synthetic oligonucleotide
ttgtttcttccaggtgtgagg

SEQ ID NO: 27758 - RNA, 21 nt, synthetic construct
  source 1..21: mol_type = other RNA; note = Description of Artificial Sequence: Synthetic oligonucleotide
tttgtttcttccaggtgtgag

SEQ ID NO: 27759 - RNA, 21 nt, synthetic construct
  source 1..21: mol_type = other RNA; note = Description of Artificial Sequence: Synthetic oligonucleotide
ctttgtttcttccaggtgtga

SEQ ID NO: 27760 - RNA, 21 nt, synthetic construct
  source 1..21: mol_type = other RNA; note = Description of Artificial Sequence: Synthetic oligonucleotide
actttgtttcttccaggtgtg

SEQ ID NO: 27761 - RNA, 21 nt, synthetic construct
  source 1..21: mol_type = other RNA; note = Description of Artificial Sequence: Synthetic oligonucleotide
tactttgtttcttccaggtgt

SEQ ID NO: 27762 - RNA, 21 nt, synthetic construct
  source 1..21: mol_type = other RNA; note = Description of Artificial Sequence: Synthetic oligonucleotide
ctactttgtttcttccaggtg

SEQ ID NO: 27763 - RNA, 21 nt, synthetic construct
  source 1..21: mol_type = other RNA; note = Description of Artificial Sequence: Synthetic oligonucleotide
cctactttgtttcttccaggt

SEQ ID NO: 27764 - RNA, 21 nt, synthetic construct
  source 1..21: mol_type = other RNA; note = Description of Artificial Sequence: Synthetic oligonucleotide
tcctactttgtttcttccagg

SEQ ID NO: 27765 - RNA, 21 nt, synthetic construct
  source 1..21: mol_type = other RNA; note = Description of Artificial Sequence: Synthetic oligonucleotide
ttcctactttgtttcttccag

SEQ ID NO: 27766 - RNA, 21 nt, synthetic construct
  source 1..21: mol_type = other RNA; note = Description of Artificial Sequence: Synthetic oligonucleotide
tttcctactttgtttcttcca

SEQ ID NO: 27767 - RNA, 21 nt, synthetic construct
  source 1..21: mol_type = other RNA; note = Description of Artificial Sequence: Synthetic oligonucleotide
ttttcctactttgtttcttcc

SEQ ID NO: 27768 - RNA, 21 nt, synthetic construct
  source 1..21: mol_type = other RNA; note = Description of Artificial Sequence: Synthetic oligonucleotide
tttttcctactttgtttcttc

SEQ ID NO: 27769 - RNA, 21 nt, synthetic construct
  source 1..21: mol_type = other RNA; note = Description of Artificial Sequence: Synthetic oligonucleotide
ctttttcctactttgtttctt

SEQ ID NO: 27770 - RNA, 21 nt, synthetic construct
  source 1..21: mol_type = other RNA; note = Description of Artificial Sequence: Synthetic oligonucleotide
actttttcctactttgtttct

SEQ ID NO: 27771 - RNA, 21 nt, synthetic construct
  source 1..21: mol_type = other RNA; note = Description of Artificial Sequence: Synthetic oligonucleotide
cactttttcctactttgtttc

SEQ ID NO: 27772 - RNA, 21 nt, synthetic construct
  source 1..21: mol_type = other RNA; note = Description of Artificial Sequence: Synthetic oligonucleotide
tcactttttcctactttgttt

SEQ ID NO: 27773 - RNA, 21 nt, synthetic construct
  source 1..21: mol_type = other RNA; note = Description of Artificial Sequence: Synthetic oligonucleotide
ttcactttttcctactttgtt

SEQ ID NO: 27774 - RNA, 21 nt, synthetic construct
  source 1..21: mol_type = other RNA; note = Description of Artificial Sequence: Synthetic oligonucleotide
gttcactttttcctactttgt

SEQ ID NO: 27775 - RNA, 21 nt, synthetic construct
  source 1..21: mol_type = other RNA; note = Description of Artificial Sequence: Synthetic oligonucleotide
tgttcactttttcctactttg

SEQ ID NO: 27776 - RNA, 21 nt, synthetic construct
  source 1..21: mol_type = other RNA; note = Description of Artificial Sequence: Synthetic oligonucleotide
ctgttcactttttcctacttt

SEQ ID NO: 27777 - RNA, 21 nt, synthetic construct
  source 1..21: mol_type = other RNA; note = Description of Artificial Sequence: Synthetic oligonucleotide
cctgttcactttttcctactt

SEQ ID NO: 27778 - RNA, 21 nt, synthetic construct
  source 1..21: mol_type = other RNA; note = Description of Artificial Sequence: Synthetic oligonucleotide
ccctgttcactttttcctact

SEQ ID NO: 27779 - RNA, 21 nt, synthetic construct
  source 1..21: mol_type = other RNA; note = Description of Artificial Sequence: Synthetic oligonucleotide
cccctgttcactttttcctac

SEQ ID NO: 27780 - RNA, 21 nt, synthetic construct
  source 1..21: mol_type = other RNA; note = Description of Artificial Sequence: Synthetic oligonucleotide
tcccctgttcactttttccta

SEQ ID NO: 27781 - RNA, 21 nt, synthetic construct
  source 1..21: mol_type = other RNA; note = Description of Artificial Sequence: Synthetic oligonucleotide
atcccctgttcactttttcct

SEQ ID NO: 27782 - RNA, 21 nt, synthetic construct
  source 1..21: mol_type = other RNA; note = Description of Artificial Sequence: Synthetic oligonucleotide
catcccctgttcactttttcc

SEQ ID NO: 27783 - RNA, 21 nt, synthetic construct
  source 1..21: mol_type = other RNA; note = Description of Artificial Sequence: Synthetic oligonucleotide
acatcccctgttcactttttc

SEQ ID NO: 27784 - RNA, 21 nt, synthetic construct
  source 1..21: mol_type = other RNA; note = Description of Artificial Sequence: Synthetic oligonucleotide
gacatcccctgttcacttttt

SEQ ID NO: 27785 - RNA, 21 nt, synthetic construct
  source 1..21: mol_type = other RNA; note = Description of Artificial Sequence: Synthetic oligonucleotide
tgacatcccctgttcactttt

SEQ ID NO: 27786 - RNA, 21 nt, synthetic construct
  source 1..21: mol_type = other RNA; note = Description of Artificial Sequence: Synthetic oligonucleotide
ttgacatcccctgttcacttt

SEQ ID NO: 27787 - RNA, 21 nt, synthetic construct
  source 1..21: mol_type = other RNA; note = Description of Artificial Sequence: Synthetic oligonucleotide
tttgacatcccctgttcactt

SEQ ID NO: 27788 - RNA, 21 nt, synthetic construct
  source 1..21: mol_type = other RNA; note = Description of Artificial Sequence: Synthetic oligonucleotide
atttgacatcccctgttcact

SEQ ID NO: 27789 - RNA, 21 nt, synthetic construct
  source 1..21: mol_type = other RNA; note = Description of Artificial Sequence: Synthetic oligonucleotide
gatttgacatcccctgttcac

SEQ ID NO: 27790 - RNA, 21 nt, synthetic construct
  source 1..21: mol_type = other RNA; note = Description of Artificial Sequence: Synthetic oligonucleotide
cgatttgacatcccctgttca

SEQ ID NO: 27791 - RNA, 21 nt, synthetic construct
  source 1..21: mol_type = other RNA; note = Description of Artificial Sequence: Synthetic oligonucleotide
tcgatttgacatcccctgttc

SEQ ID NO: 27792 - RNA, 21 nt, synthetic construct
  source 1..21: mol_type = other RNA; note = Description of Artificial Sequence: Synthetic oligonucleotide
atcgatttgacatcccctgtt

SEQ ID NO: 27793 - RNA, 21 nt, synthetic construct
  source 1..21: mol_type = other RNA; note = Description of Artificial Sequence: Synthetic oligonucleotide
aatcgatttgacatcccctgt

SEQ ID NO: 27794 - RNA, 21 nt, synthetic construct
  source 1..21: mol_type = other RNA; note = Description of Artificial Sequence: Synthetic oligonucleotide
gaatcgatttgacatcccctg

SEQ ID NO: 27795 - RNA, 21 nt, synthetic construct
  source 1..21: mol_type = other RNA; note = Description of Artificial Sequence: Synthetic oligonucleotide
agaatcgatttgacatcccct

SEQ ID NO: 27796 - RNA, 21 nt, synthetic construct
  source 1..21: mol_type = other RNA; note = Description of Artificial Sequence: Synthetic oligonucleotide
aagaatcgatttgacatcccc

SEQ ID NO: 27797 - RNA, 21 nt, synthetic construct
  source 1..21: mol_type = other RNA; note = Description of Artificial Sequence: Synthetic oligonucleotide
caagaatcgatttgacatccc

SEQ ID NO: 27798 - RNA, 21 nt, synthetic construct
  source 1..21: mol_type = other RNA; note = Description of Artificial Sequence: Synthetic oligonucleotide
tcaagaatcgatttgacatcc

SEQ ID NO: 27799 - RNA, 21 nt, synthetic construct
  source 1..21: mol_type = other RNA; note = Description of Artificial Sequence: Synthetic oligonucleotide
ttcaagaatcgatttgacatc

SEQ ID NO: 27800 - RNA, 21 nt, synthetic construct
  source 1..21: mol_type = other RNA; note = Description of Artificial Sequence: Synthetic oligonucleotide
attcaagaatcgatttgacat

SEQ ID NO: 27801 - RNA, 21 nt, synthetic construct
  source 1..21: mol_type = other RNA; note = Description of Artificial Sequence: Synthetic oligonucleotide
aattcaagaatcgatttgaca

SEQ ID NO: 27802 - RNA, 21 nt, synthetic construct
  source 1..21: mol_type = other RNA; note = Description of Artificial Sequence: Synthetic oligonucleotide
gaattcaagaatcgatttgac

SEQ ID NO: 27803 - RNA, 21 nt, synthetic construct
  source 1..21: mol_type = other RNA; note = Description of Artificial Sequence: Synthetic oligonucleotide
ggaattcaagaatcgatttga

SEQ ID NO: 27804 - RNA, 21 nt, synthetic construct
  source 1..21: mol_type = other RNA; note = Description of Artificial Sequence: Synthetic oligonucleotide
gggaattcaagaatcgatttg

SEQ ID NO: 27805 - RNA, 21 nt, synthetic construct
  source 1..21: mol_type = other RNA; note = Description of Artificial Sequence: Synthetic oligonucleotide
cgggaattcaagaatcgattt

SEQ ID NO: 27806 - RNA, 21 nt, synthetic construct
  source 1..21: mol_type = other RNA; note = Description of Artificial Sequence: Synthetic oligonucleotide
gcgggaattcaagaatcgatt

SEQ ID NO: 27807 - RNA, 21 nt, synthetic construct
  source 1..21: mol_type = other RNA; note = Description of Artificial Sequence: Synthetic oligonucleotide
agcgggaattcaagaatcgat

SEQ ID NO: 27808 - RNA, 21 nt, synthetic construct
  source 1..21: mol_type = other RNA; note = Description of Artificial Sequence: Synthetic oligonucleotide
cagcgggaattcaagaatcga

SEQ ID NO: 27809 - RNA, 21 nt, synthetic construct
  source 1..21: mol_type = other RNA; note = Description of Artificial Sequence: Synthetic oligonucleotide
gcagcgggaattcaagaatcg

SEQ ID NO: 27810 - RNA, 21 nt, synthetic construct
  source 1..21: mol_type = other RNA; note = Description of Artificial Sequence: Synthetic oligonucleotide
tgcagcgggaattcaagaatc

SEQ ID NO: 27811 - RNA, 21 nt, synthetic construct
  source 1..21: mol_type = other RNA; note = Description of Artificial Sequence: Synthetic oligonucleotide
ttgcagcgggaattcaagaat

SEQ ID NO: 27812 - RNA, 21 nt, synthetic construct
  source 1..21: mol_type = other RNA; note = Description of Artificial Sequence: Synthetic oligonucleotide
cttgcagcgggaattcaagaa

SEQ ID NO: 27813 - RNA, 21 nt, synthetic construct
  source 1..21: mol_type = other RNA; note = Description of Artificial Sequence: Synthetic oligonucleotide
gcttgcagcgggaattcaaga

SEQ ID NO: 27814 - RNA, 21 nt, synthetic construct
  source 1..21: mol_type = other RNA; note = Description of Artificial Sequence: Synthetic oligonucleotide
agcttgcagcgggaattcaag

SEQ ID NO: 27815 - RNA, 21 nt, synthetic construct
  source 1..21: mol_type = other RNA; note = Description of Artificial Sequence: Synthetic oligonucleotide
tagcttgcagcgggaattcaa

SEQ ID NO: 27816 - RNA, 21 nt, synthetic construct
  source 1..21: mol_type = other RNA; note = Description of Artificial Sequence: Synthetic oligonucleotide
ctagcttgcagcgggaattca

SEQ ID NO: 27817 - RNA, 21 nt, synthetic construct
  source 1..21: mol_type = other RNA; note = Description of Artificial Sequence: Synthetic oligonucleotide
tctagcttgcagcgggaattc

SEQ ID NO: 27818 - RNA, 21 nt, synthetic construct
  source 1..21: mol_type = other RNA; note = Description of Artificial Sequence: Synthetic oligonucleotide
ctctagcttgcagcgggaatt

SEQ ID NO: 27819 - RNA, 21 nt, synthetic construct
  source 1..21: mol_type = other RNA; note = Description of Artificial Sequence: Synthetic oligonucleotide
gctctagcttgcagcgggaat

SEQ ID NO: 27820 - RNA, 21 nt, synthetic construct
  source 1..21: mol_type = other RNA; note = Description of Artificial Sequence: Synthetic oligonucleotide
ggctctagcttgcagcgggaa

SEQ ID NO: 27821 - RNA, 21 nt, synthetic construct
  source 1..21: mol_type = other RNA; note = Description of Artificial Sequence: Synthetic oligonucleotide
cggctctagcttgcagcggga

SEQ ID NO: 27822 - RNA, 21 nt, synthetic construct
  source 1..21: mol_type = other RNA; note = Description of Artificial Sequence: Synthetic oligonucleotide
gcggctctagcttgcagcggg

SEQ ID NO: 27823 - RNA, 21 nt, synthetic construct
  source 1..21: mol_type = other RNA; note = Description of Artificial Sequence: Synthetic oligonucleotide
tgcggctctagcttgcagcgg

SEQ ID NO: 27824 - RNA, 21 nt, synthetic construct
  source 1..21: mol_type = other RNA; note = Description of Artificial Sequence: Synthetic oligonucleotide
ctgcggctctagcttgcagcg

SEQ ID NO: 27825 - RNA, 21 nt, synthetic construct
  source 1..21: mol_type = other RNA; note = Description of Artificial Sequence: Synthetic oligonucleotide
cctgcggctctagcttgcagc

SEQ ID NO: 27826 - RNA, 21 nt, synthetic construct
  source 1..21: mol_type = other RNA; note = Description of Artificial Sequence: Synthetic oligonucleotide
gcctgcggctctagcttgcag

SEQ ID NO: 27827 - RNA, 21 nt, synthetic construct
  source 1..21: mol_type = other RNA; note = Description of Artificial Sequence: Synthetic oligonucleotide
tgcctgcggctctagcttgca

SEQ ID NO: 27828 - RNA, 21 nt, synthetic construct
  source 1..21: mol_type = other RNA; note = Description of Artificial Sequence: Synthetic oligonucleotide
gtgcctgcggctctagcttgc

SEQ ID NO: 27829 - RNA, 21 nt, synthetic construct
  source 1..21: mol_type = other RNA; note = Description of Artificial Sequence: Synthetic oligonucleotide
ggtgcctgcggctctagcttg

SEQ ID NO: 27830 - RNA, 21 nt, synthetic construct
  source 1..21: mol_type = other RNA; note = Description of Artificial Sequence: Synthetic oligonucleotide
gggtgcctgcggctctagctt

SEQ ID NO: 27831 - RNA, 21 nt, synthetic construct
  source 1..21: mol_type = other RNA; note = Description of Artificial Sequence: Synthetic oligonucleotide
agggtgcctgcggctctagct

SEQ ID NO: 27832 - RNA, 21 nt, synthetic construct
  source 1..21: mol_type = other RNA; note = Description of Artificial Sequence: Synthetic oligonucleotide
gagggtgcctgcggctctagc

SEQ ID NO: 27833 - RNA, 21 nt, synthetic construct
  source 1..21: mol_type = other RNA; note = Description of Artificial Sequence: Synthetic oligonucleotide
agagggtgcctgcggctctag

SEQ ID NO: 27834 - RNA, 21 nt, synthetic construct
  source 1..21: mol_type = other RNA; note = Description of Artificial Sequence: Synthetic oligonucleotide
gagagggtgcctgcggctcta

SEQ ID NO: 27835 - RNA, 21 nt, synthetic construct
  source 1..21: mol_type = other RNA; note = Description of Artificial Sequence: Synthetic oligonucleotide
tgagagggtgcctgcggctct

SEQ ID NO: 27836 - RNA, 21 nt, synthetic construct
  source 1..21: mol_type = other RNA; note = Description of Artificial Sequence: Synthetic oligonucleotide
gtgagagggtgcctgcggctc

SEQ ID NO: 27837 - RNA, 21 nt, synthetic construct
  source 1..21: mol_type = other RNA; note = Description of Artificial Sequence: Synthetic oligonucleotide
agtgagagggtgcctgcggct

SEQ ID NO: 27838 - RNA, 21 nt, synthetic construct
  source 1..21: mol_type = other RNA; note = Description of Artificial Sequence: Synthetic oligonucleotide
gagtgagagggtgcctgcggc

SEQ ID NO: 27839 - RNA, 21 nt, synthetic construct
  source 1..21: mol_type = other RNA; note = Description of Artificial Sequence: Synthetic oligonucleotide
tgagtgagagggtgcctgcgg

SEQ ID NO: 27840 - RNA, 21 nt, synthetic construct
  source 1..21: mol_type = other RNA; note = Description of Artificial Sequence: Synthetic oligonucleotide
ttgagtgagagggtgcctgcg

SEQ ID NO: 27841 - RNA, 21 nt, synthetic construct
  source 1..21: mol_type = other RNA; note = Description of Artificial Sequence: Synthetic oligonucleotide
attgagtgagagggtgcctgc

SEQ ID NO: 27842 - RNA, 21 nt, synthetic construct
  source 1..21: mol_type = other RNA; note = Description of Artificial Sequence: Synthetic oligonucleotide
aattgagtgagagggtgcctg

SEQ ID NO: 27843 - RNA, 21 nt, synthetic construct
  source 1..21: mol_type = other RNA; note = Description of Artificial Sequence: Synthetic oligonucleotide
aaattgagtgagagggtgcct

SEQ ID NO: 27844 - RNA, 21 nt, synthetic construct
  source 1..21: mol_type = other RNA; note = Description of Artificial Sequence: Synthetic oligonucleotide
gaaattgagtgagagggtgcc

SEQ ID NO: 27845 - RNA, 21 nt, synthetic construct
  source 1..21: mol_type = other RNA; note = Description of Artificial Sequence: Synthetic oligonucleotide
ggaaattgagtgagagggtgc

SEQ ID NO: 27846 - RNA, 21 nt, synthetic construct
  source 1..21: mol_type = other RNA; note = Description of Artificial Sequence: Synthetic oligonucleotide
tggaaattgagtgagagggtg

SEQ ID NO: 27847 - RNA, 21 nt, synthetic construct
  source 1..21: mol_type = other RNA; note = Description of Artificial Sequence: Synthetic oligonucleotide
gtggaaattgagtgagagggt

SEQ ID NO: 27848 - RNA, 21 nt, synthetic construct
  source 1..21: mol_type = other RNA; note = Description of Artificial Sequence: Synthetic oligonucleotide
agtggaaattgagtgagaggg

SEQ ID NO: 27849 - RNA, 21 nt, synthetic construct
  source 1..21: mol_type = other RNA; note = Description of Artificial Sequence: Synthetic oligonucleotide
gagtggaaattgagtgagagg

SEQ ID NO: 27850 - RNA, 21 nt, synthetic construct
  source 1..21: mol_type = other RNA; note = Description of Artificial Sequence: Synthetic oligonucleotide
tgagtggaaattgagtgagag

SEQ ID NO: 27851 - RNA, 21 nt, synthetic construct
  source 1..21: mol_type = other RNA; note = Description of Artificial Sequence: Synthetic oligonucleotide
ctgagtggaaattgagtgaga

SEQ ID NO: 27852 - RNA, 21 nt, synthetic construct
  source 1..21: mol_type = other RNA; note = Description of Artificial Sequence: Synthetic oligonucleotide
tctgagtggaaattgagtgag

SEQ ID NO: 27853 - RNA, 21 nt, synthetic construct
  source 1..21: mol_type = other RNA; note = Description of Artificial Sequence: Synthetic oligonucleotide
ttctgagtggaaattgagtga

SEQ ID NO: 27854 - RNA, 21 nt, synthetic construct
  source 1..21: mol_type = other RNA; note = Description of Artificial Sequence: Synthetic oligonucleotide
gttctgagtggaaattgagtg

SEQ ID NO: 27855 - RNA, 21 nt, synthetic construct
  source 1..21: mol_type = other RNA; note = Description of Artificial Sequence: Synthetic oligonucleotide
ggttctgagtggaaattgagt

SEQ ID NO: 27856 - RNA, 21 nt, synthetic construct
  source 1..21: mol_type = other RNA; note = Description of Artificial Sequence: Synthetic oligonucleotide
gggttctgagtggaaattgag

SEQ ID NO: 27857 - RNA, 21 nt, synthetic construct
  source 1..21: mol_type = other RNA; note = Description of Artificial Sequence: Synthetic oligonucleotide
agggttctgagtggaaattga

SEQ ID NO: 27858 - RNA, 21 nt, synthetic construct
  source 1..21: mol_type = other RNA; note = Description of Artificial Sequence: Synthetic oligonucleotide
tagggttctgagtggaaattg

SEQ ID NO: 27859 - RNA, 21 nt, synthetic construct
  source 1..21: mol_type = other RNA; note = Description of Artificial Sequence: Synthetic oligonucleotide
atagggttctgagtggaaatt

SEQ ID NO: 27860 - RNA, 21 nt, synthetic construct
  source 1..21: mol_type = other RNA; note = Description of Artificial Sequence: Synthetic oligonucleotide
tatagggttctgagtggaaat

SEQ ID NO: 27861 - RNA, 21 nt, synthetic construct
  source 1..21: mol_type = other RNA; note = Description of Artificial Sequence: Synthetic oligonucleotide
ttatagggttctgagtggaaa

SEQ ID NO: 27862 - RNA, 21 nt, synthetic construct
  source 1..21: mol_type = other RNA; note = Description of Artificial Sequence: Synthetic oligonucleotide
tttatagggttctgagtggaa

SEQ ID NO: 27863 - RNA, 21 nt, synthetic construct
  source 1..21: mol_type = other RNA; note = Description of Artificial Sequence: Synthetic oligonucleotide
gtttatagggttctgagtgga

SEQ ID NO: 27864 - RNA, 21 nt, synthetic construct
  source 1..21: mol_type = other RNA; note = Description of Artificial Sequence: Synthetic oligonucleotide
tgtttatagggttctgagtgg

SEQ ID NO: 27865 - RNA, 21 nt, synthetic construct
  source 1..21: mol_type = other RNA; note = Description of Artificial Sequence: Synthetic oligonucleotide
gtgtttatagggttctgagtg

SEQ ID NO: 27866 - RNA, 21 nt, synthetic construct
  source 1..21: mol_type = other RNA; note = Description of Artificial Sequence: Synthetic oligonucleotide
ggtgtttatagggttctgagt

SEQ ID NO: 27867 - RNA, 21 nt, synthetic construct
  source 1..21: mol_type = other RNA; note = Description of Artificial Sequence: Synthetic oligonucleotide
tggtgtttatagggttctgag

SEQ ID NO: 27868 - RNA, 21 nt, synthetic construct
  source 1..21: mol_type = other RNA; note = Description of Artificial Sequence: Synthetic oligonucleotide
ctggtgtttatagggttctga

SEQ ID NO: 27869 - RNA, 21 nt, synthetic construct
  source 1..21: mol_type = other RNA; note = Description of Artificial Sequence: Synthetic oligonucleotide
actggtgtttatagggttctg

SEQ ID NO: 27870 - RNA, 21 nt, synthetic construct
  source 1..21: mol_type = other RNA; note = Description of Artificial Sequence: Synthetic oligonucleotide
cactggtgtttatagggttct

SEQ ID NO: 27871 - RNA, 21 nt, synthetic construct
  source 1..21: mol_type = other RNA; note = Description of Artificial Sequence: Synthetic oligonucleotide
ccactggtgtttatagggttc

SEQ ID NO: 27872 - RNA, 21 nt, synthetic construct
  source 1..21: mol_type = other RNA; note = Description of Artificial Sequence: Synthetic oligonucleotide
cccactggtgtttatagggtt

SEQ ID NO: 27873 - RNA, 21 nt, synthetic construct
  source 1..21: mol_type = other RNA; note = Description of Artificial Sequence: Synthetic oligonucleotide
tcccactggtgtttatagggt

SEQ ID NO: 27874 - RNA, 21 nt, synthetic construct
  source 1..21: mol_type = other RNA; note = Description of Artificial Sequence: Synthetic oligonucleotide
ttcccactggtgtttataggg

SEQ ID NO: 27875 - RNA, 21 nt, synthetic construct
  source 1..21: mol_type = other RNA; note = Description of Artificial Sequence: Synthetic oligonucleotide
cttcccactggtgtttatagg

SEQ ID NO: 27876 - RNA, 21 nt, synthetic construct
  source 1..21: mol_type = other RNA; note = Description of Artificial Sequence: Synthetic oligonucleotide
ccttcccactggtgtttatag

SEQ ID NO: 27877 - RNA, 21 nt, synthetic construct
  source 1..21: mol_type = other RNA; note = Description of Artificial Sequence: Synthetic oligonucleotide
cccttcccactggtgtttata

SEQ ID NO: 27878 - RNA, 21 nt, synthetic construct
  source 1..21: mol_type = other RNA; note = Description of Artificial Sequence: Synthetic oligonucleotide
gcccttcccactggtgtttat

SEQ ID NO: 27879 - RNA, 21 nt, synthetic construct
  source 1..21: mol_type = other RNA; note = Description of Artificial Sequence: Synthetic oligonucleotide
tgcccttcccactggtgttta

SEQ ID NO: 27880 - RNA, 21 nt, synthetic construct
  source 1..21: mol_type = other RNA; note = Description of Artificial Sequence: Synthetic oligonucleotide
ttgcccttcccactggtgttt

SEQ ID NO: 27881 - RNA, 21 nt, synthetic construct
  source 1..21: mol_type = other RNA; note = Description of Artificial Sequence: Synthetic oligonucleotide
gttgcccttcccactggtgtt

SEQ ID NO: 27882 - RNA, 21 nt, synthetic construct
  source 1..21: mol_type = other RNA; note = Description of Artificial Sequence: Synthetic oligonucleotide
ggttgcccttcccactggtgt

SEQ ID NO: 27883 - RNA, 21 nt, synthetic construct
  source 1..21: mol_type = other RNA; note = Description of Artificial Sequence: Synthetic oligonucleotide
gggttgcccttcccactggtg

SEQ ID NO: 27884 - RNA, 21 nt, synthetic construct
  source 1..21: mol_type = other RNA; note = Description of Artificial Sequence: Synthetic oligonucleotide
tgggttgcccttcccactggt

SEQ ID NO: 27885 - RNA, 21 nt, synthetic construct
  source 1..21: mol_type = other RNA; note = Description of Artificial Sequence: Synthetic oligonucleotide
gtgggttgcccttcccactgg

SEQ ID NO: 27886 - RNA, 21 nt, synthetic construct
  source 1..21: mol_type = other RNA; note = Description of Artificial Sequence: Synthetic oligonucleotide
agtgggttgcccttcccactg

SEQ ID NO: 27887 - RNA, 21 nt, synthetic construct
  source 1..21: mol_type = other RNA; note = Description of Artificial Sequence: Synthetic oligonucleotide
cagtgggttgcccttcccact

SEQ ID NO: 27888 - RNA, 21 nt, synthetic construct
  source 1..21: mol_type = other RNA; note = Description of Artificial Sequence: Synthetic oligonucleotide
gcagtgggttgcccttcccac

SEQ ID NO: 27889 - RNA, 21 nt, synthetic construct
  source 1..21: mol_type = other RNA; note = Description of Artificial Sequence: Synthetic oligonucleotide
tgcagtgggttgcccttccca

SEQ ID NO: 27890 - RNA, 21 nt, synthetic construct
  source 1..21: mol_type = other RNA; note = Description of Artificial Sequence: Synthetic oligonucleotide
gtgcagtgggttgcccttccc

SEQ ID NO: 27891 - RNA, 21 nt, synthetic construct
  source 1..21: mol_type = other RNA; note = Description of Artificial Sequence: Synthetic oligonucleotide
cgtgcagtgggttgcccttcc

SEQ ID NO: 27892 - RNA, 21 nt, synthetic construct
  source 1..21: mol_type = other RNA; note = Description of Artificial Sequence: Synthetic oligonucleotide
acgtgcagtgggttgcccttc

SEQ ID NO: 27893 - RNA, 21 nt, synthetic construct
  source 1..21: mol_type = other RNA; note = Description of Artificial Sequence: Synthetic oligonucleotide
cacgtgcagtgggttgccctt

SEQ ID NO: 27894 - RNA, 21 nt, synthetic construct
  source 1..21: mol_type = other RNA; note = Description of Artificial Sequence: Synthetic oligonucleotide
ccacgtgcagtgggttgccct

SEQ ID NO: 27895 - RNA, 21 nt, synthetic construct
  source 1..21: mol_type = other RNA; note = Description of Artificial Sequence: Synthetic oligonucleotide
cccacgtgcagtgggttgccc

SEQ ID NO: 27896 - RNA, 21 nt, synthetic construct
  source 1..21: mol_type = other RNA; note = Description of Artificial Sequence: Synthetic oligonucleotide
tcccacgtgcagtgggttgcc

SEQ ID NO: 27897 - RNA, 21 nt, synthetic construct
  source 1..21: mol_type = other RNA; note = Description of Artificial Sequence: Synthetic oligonucleotide
ttcccacgtgcagtgggttgc

SEQ ID NO: 27898 - RNA, 21 nt, synthetic construct
  source 1..21: mol_type = other RNA; note = Description of Artificial Sequence: Synthetic oligonucleotide
attcccacgtgcagtgggttg

SEQ ID NO: 27899 - RNA, 21 nt, synthetic construct
  source 1..21: mol_type = other RNA; note = Description of Artificial Sequence: Synthetic oligonucleotide
cattcccacgtgcagtgggtt

SEQ ID NO: 27900 - RNA, 21 nt, synthetic construct
  source 1..21: mol_type = other RNA; note = Description of Artificial Sequence: Synthetic oligonucleotide
gcattcccacgtgcagtgggt

SEQ ID NO: 27901 - RNA, 21 nt, synthetic construct
  source 1..21: mol_type = other RNA; note = Description of Artificial Sequence: Synthetic oligonucleotide
tgcattcccacgtgcagtggg

SEQ ID NO: 27902 - RNA, 21 nt, synthetic construct
  source 1..21: mol_type = other RNA; note = Description of Artificial Sequence: Synthetic oligonucleotide
gtgcattcccacgtgcagtgg

SEQ ID NO: 27903 - RNA, 21 nt, synthetic construct
  source 1..21: mol_type = other RNA; note = Description of Artificial Sequence: Synthetic oligonucleotide
agtgcattcccacgtgcagtg

SEQ ID NO: 27904 - RNA, 21 nt, synthetic construct
  source 1..21: mol_type = other RNA; note = Description of Artificial Sequence: Synthetic oligonucleotide
cagtgcattcccacgtgcagt

SEQ ID NO: 27905 - RNA, 21 nt, synthetic construct
  source 1..21: mol_type = other RNA; note = Description of Artificial Sequence: Synthetic oligonucleotide
tcagtgcattcccacgtgcag

SEQ ID NO: 27906 - RNA, 21 nt, synthetic construct
  source 1..21: mol_type = other RNA; note = Description of Artificial Sequence: Synthetic oligonucleotide
atcagtgcattcccacgtgca

SEQ ID NO: 27907 - RNA, 21 nt, synthetic construct
  source 1..21: mol_type = other RNA; note = Description of Artificial Sequence: Synthetic oligonucleotide
aatcagtgcattcccacgtgc

SEQ ID NO: 27908 - RNA, 21 nt, synthetic construct
  source 1..21: mol_type = other RNA; note = Description of Artificial Sequence: Synthetic oligonucleotide
aaatcagtgcattcccacgtg

SEQ ID NO: 27909 - RNA, 21 nt, synthetic construct
  source 1..21: mol_type = other RNA; note = Description of Artificial Sequence: Synthetic oligonucleotide
aaaatcagtgcattcccacgt

SEQ ID NO: 27910 - RNA, 21 nt, synthetic construct
  source 1..21: mol_type = other RNA; note = Description of Artificial Sequence: Synthetic oligonucleotide
aaaaatcagtgcattcccacg

SEQ ID NO: 27911 - RNA, 21 nt, synthetic construct
  source 1..21: mol_type = other RNA; note = Description of Artificial Sequence: Synthetic oligonucleotide
gaaaaatcagtgcattcccac

SEQ ID NO: 27912 - RNA, 21 nt, synthetic construct
  source 1..21: mol_type = other RNA; note = Description of Artificial Sequence: Synthetic oligonucleotide
ggaaaaatcagtgcattccca

SEQ ID NO: 27913 - RNA, 21 nt, synthetic construct
  source 1..21: mol_type = other RNA; note = Description of Artificial Sequence: Synthetic oligonucleotide
aggaaaaatcagtgcattccc

SEQ ID NO: 27914 - RNA, 21 nt, synthetic construct
  source 1..21: mol_type = other RNA; note = Description of Artificial Sequence: Synthetic oligonucleotide
taggaaaaatcagtgcattcc

SEQ ID NO: 27915 - RNA, 21 nt, synthetic construct
  source 1..21: mol_type = other RNA; note = Description of Artificial Sequence: Synthetic oligonucleotide
ctaggaaaaatcagtgcattc

SEQ ID NO: 27916 - RNA, 21 nt, synthetic construct
  source 1..21: mol_type = other RNA; note = Description of Artificial Sequence: Synthetic oligonucleotide
cctaggaaaaatcagtgcatt

SEQ ID NO: 27917 - RNA, 21 nt, synthetic construct
  source 1..21: mol_type = other RNA; note = Description of Artificial Sequence: Synthetic oligonucleotide
tcctaggaaaaatcagtgcat

SEQ ID NO: 27918 - RNA, 21 nt, synthetic construct
  source 1..21: mol_type = other RNA; note = Description of Artificial Sequence: Synthetic oligonucleotide
ctcctaggaaaaatcagtgca

SEQ ID NO: 27919 - RNA, 21 nt, synthetic construct
  source 1..21: mol_type = other RNA; note = Description of Artificial Sequence: Synthetic oligonucleotide
actcctaggaaaaatcagtgc

SEQ ID NO: 27920 - RNA, 21 nt, synthetic construct
  source 1..21: mol_type = other RNA; note = Description of Artificial Sequence: Synthetic oligonucleotide
tactcctaggaaaaatcagtg

SEQ ID NO: 27921 - RNA, 21 nt, synthetic construct
  source 1..21: mol_type = other RNA; note = Description of Artificial Sequence: Synthetic oligonucleotide
ctactcctaggaaaaatcagt

SEQ ID NO: 27922 - RNA, 21 nt, synthetic construct
  source 1..21: mol_type = other RNA; note = Description of Artificial Sequence: Synthetic oligonucleotide
tctactcctaggaaaaatcag

SEQ ID NO: 27923 - RNA, 21 nt, synthetic construct
  source 1..21: mol_type = other RNA; note = Description of Artificial Sequence: Synthetic oligonucleotide
gtctactcctaggaaaaatca

SEQ ID NO: 27924 - RNA, 21 nt, synthetic construct
  source 1..21: mol_type = other RNA; note = Description of Artificial Sequence: Synthetic oligonucleotide
tgtctactcctaggaaaaatc

SEQ ID NO: 27925 - RNA, 21 nt, synthetic construct
  source 1..21: mol_type = other RNA; note = Description of Artificial Sequence: Synthetic oligonucleotide
atgtctactcctaggaaaaat

SEQ ID NO: 27926 - RNA, 21 nt, synthetic construct
  source 1..21: mol_type = other RNA; note = Description of Artificial Sequence: Synthetic oligonucleotide
catgtctactcctaggaaaaa

SEQ ID NO: 27927 - RNA, 21 nt, synthetic construct
  source 1..21: mol_type = other RNA; note = Description of Artificial Sequence: Synthetic oligonucleotide
acatgtctactcctaggaaaa

SEQ ID NO: 27928 - RNA, 21 nt, synthetic construct
  source 1..21: mol_type = other RNA; note = Description of Artificial Sequence: Synthetic oligonucleotide
aacatgtctactcctaggaaa

SEQ ID NO: 27929 - RNA, 21 nt, synthetic construct
  source 1..21: mol_type = other RNA; note = Description of Artificial Sequence: Synthetic oligonucleotide
gaacatgtctactcctaggaa

SEQ ID NO: 27930 - RNA, 21 nt, synthetic construct
  source 1..21: mol_type = other RNA; note = Description of Artificial Sequence: Synthetic oligonucleotide
ggaacatgtctactcctagga

SEQ ID NO: 27931 - RNA, 21 nt, synthetic construct
  source 1..21: mol_type = other RNA; note = Description of Artificial Sequence: Synthetic oligonucleotide
aggaacatgtctactcctagg

SEQ ID NO: 27932 - RNA, 21 nt, synthetic construct
  source 1..21: mol_type = other RNA; note = Description of Artificial Sequence: Synthetic oligonucleotide
gaggaacatgtctactcctag

SEQ ID NO: 27933 - RNA, 21 nt, synthetic construct
  source 1..21: mol_type = other RNA; note = Description of Artificial Sequence: Synthetic oligonucleotide
agaggaacatgtctactccta

SEQ ID NO: 27934 - RNA, 21 nt, synthetic construct
  source 1..21: mol_type = other RNA; note = Description of Artificial Sequence: Synthetic oligonucleotide
tagaggaacatgtctactcct

SEQ ID NO: 27935 - RNA, 21 nt, synthetic construct
  source 1..21: mol_type = other RNA; note = Description of Artificial Sequence: Synthetic oligonucleotide
ttagaggaacatgtctactcc

SEQ ID NO: 27936 - RNA, 21 nt, synthetic construct
  source 1..21: mol_type = other RNA; note = Description of Artificial Sequence: Synthetic oligonucleotide
attagaggaacatgtctactc

SEQ ID NO: 27937 - RNA, 21 nt, synthetic construct
  source 1..21: mol_type = other RNA; note = Description of Artificial Sequence: Synthetic oligonucleotide
aattagaggaacatgtctact

SEQ ID NO: 27938 - RNA, 21 nt, synthetic construct
  source 1..21: mol_type = other RNA; note = Description of Artificial Sequence: Synthetic oligonucleotide
taattagaggaacatgtctac

SEQ ID NO: 27939 - RNA, 21 nt, synthetic construct
  source 1..21: mol_type = other RNA; note = Description of Artificial Sequence: Synthetic oligonucleotide
gtaattagaggaacatgtcta

SEQ ID NO: 27940 - RNA, 21 nt, synthetic construct
  source 1..21: mol_type = other RNA; note = Description of Artificial Sequence: Synthetic oligonucleotide
agtaattagaggaacatgtct

SEQ ID NO: 27941 - RNA, 21 nt, synthetic construct
  source 1..21: mol_type = other RNA; note = Description of Artificial Sequence: Synthetic oligonucleotide
gagtaattagaggaacatgtc

SEQ ID NO: 27942 - RNA, 21 nt, synthetic construct
  source 1..21: mol_type = other RNA; note = Description of Artificial Sequence: Synthetic oligonucleotide
ggagtaattagaggaacatgt

SEQ ID NO: 27943 - RNA, 21 nt, synthetic construct
  source 1..21: mol_type = other RNA; note = Description of Artificial Sequence: Synthetic oligonucleotide
gggagtaattagaggaacatg

SEQ ID NO: 27944 - RNA, 21 nt, synthetic construct
  source 1..21: mol_type = other RNA; note = Description of Artificial Sequence: Synthetic oligonucleotide
agggagtaattagaggaacat

SEQ ID NO: 27945 - RNA, 21 nt, synthetic construct
  source 1..21: mol_type = other RNA; note = Description of Artificial Sequence: Synthetic oligonucleotide
cagggagtaattagaggaaca

SEQ ID NO: 27946 - RNA, 21 nt, synthetic construct
  source 1..21: mol_type = other RNA; note = Description of Artificial Sequence: Synthetic oligonucleotide
tcagggagtaattagaggaac

SEQ ID NO: 27947 - RNA, 21 nt, synthetic construct
  source 1..21: mol_type = other RNA; note = Description of Artificial Sequence: Synthetic oligonucleotide
ctcagggagtaattagaggaa

SEQ ID NO: 27948 - RNA, 21 nt, synthetic construct
  source 1..21: mol_type = other RNA; note = Description of Artificial Sequence: Synthetic oligonucleotide
cctcagggagtaattagagga

SEQ ID NO: 27949 - RNA, 21 nt, synthetic construct
  source 1..21: mol_type = other RNA; note = Description of Artificial Sequence: Synthetic oligonucleotide
ccctcagggagtaattagagg

SEQ ID NO: 27950 - RNA, 21 nt, synthetic construct
  source 1..21: mol_type = other RNA; note = Description of Artificial Sequence: Synthetic oligonucleotide
accctcagggagtaattagag

SEQ ID NO: 27951 - RNA, 21 nt, synthetic construct
  source 1..21: mol_type = other RNA; note = Description of Artificial Sequence: Synthetic oligonucleotide
aaccctcagggagtaattaga

SEQ ID NO: 27952 - RNA, 21 nt, synthetic construct
  source 1..21: mol_type = other RNA; note = Description of Artificial Sequence: Synthetic oligonucleotide
taaccctcagggagtaattag

SEQ ID NO: 27953 - RNA, 21 nt, synthetic construct
  source 1..21: mol_type = other RNA; note = Description of Artificial Sequence: Synthetic oligonucleotide
ctaaccctcagggagtaatta

SEQ ID NO: 27954 - RNA, 21 nt, synthetic construct
  source 1..21: mol_type = other RNA; note = Description of Artificial Sequence: Synthetic oligonucleotide
actaaccctcagggagtaatt

SEQ ID NO: 27955 - RNA, 21 nt, synthetic construct
  source 1..21: mol_type = other RNA; note = Description of Artificial Sequence: Synthetic oligonucleotide
aactaaccctcagggagtaat

SEQ ID NO: 27956 - RNA, 21 nt, synthetic construct
  source 1..21: mol_type = other RNA; note = Description of Artificial Sequence: Synthetic oligonucleotide
caactaaccctcagggagtaa

SEQ ID NO: 27957 - RNA, 21 nt, synthetic construct
  source 1..21: mol_type = other RNA; note = Description of Artificial Sequence: Synthetic oligonucleotide
ccaactaaccctcagggagta

SEQ ID NO: 27958 - RNA, 21 nt, synthetic construct
  source 1..21: mol_type = other RNA; note = Description of Artificial Sequence: Synthetic oligonucleotide
cccaactaaccctcagggagt

SEQ ID NO: 27959 - RNA, 21 nt, synthetic construct
  source 1..21: mol_type = other RNA; note = Description of Artificial Sequence: Synthetic oligonucleotide
ccccaactaaccctcagggag

SEQ ID NO: 27960 - RNA, 21 nt, synthetic construct
  source 1..21: mol_type = other RNA; note = Description of Artificial Sequence: Synthetic oligonucleotide
gccccaactaaccctcaggga

SEQ ID NO: 27961 - RNA, 21 nt, synthetic construct
  source 1..21: mol_type = other RNA; note = Description of Artificial Sequence: Synthetic oligonucleotide
agccccaactaaccctcaggg

SEQ ID NO: 27962 - RNA, 21 nt, synthetic construct
  source 1..21: mol_type = other RNA; note = Description of Artificial Sequence: Synthetic oligonucleotide
tagccccaactaaccctcagg

SEQ ID NO: 27963 - RNA, 21 nt, synthetic construct
  source 1..21: mol_type = other RNA; note = Description of Artificial Sequence: Synthetic oligonucleotide
ttagccccaactaaccctcag

SEQ ID NO: 27964 - RNA, 21 nt, synthetic construct
  source 1..21: mol_type = other RNA; note = Description of Artificial Sequence: Synthetic oligonucleotide
tttagccccaactaaccctca

SEQ ID NO: 27965 - RNA, 21 nt, synthetic construct
  source 1..21: mol_type = other RNA; note = Description of Artificial Sequence: Synthetic oligonucleotide
gtttagccccaactaaccctc

SEQ ID NO: 27966 - RNA, 21 nt, synthetic construct
  source 1..21: mol_type = other RNA; note = Description of Artificial Sequence: Synthetic oligonucleotide
ggtttagccccaactaaccct

SEQ ID NO: 27967 - RNA, 21 nt, synthetic construct
  source 1..21: mol_type = other RNA; note = Description of Artificial Sequence: Synthetic oligonucleotide
tggtttagccccaactaaccc

SEQ ID NO: 27968 - RNA, 21 nt, synthetic construct
  source 1..21: mol_type = other RNA; note = Description of Artificial Sequence: Synthetic oligonucleotide
atggtttagccccaactaacc

SEQ ID NO: 27969 - RNA, 21 nt, synthetic construct
  source 1..21: mol_type = other RNA; note = Description of Artificial Sequence: Synthetic oligonucleotide
catggtttagccccaactaac

SEQ ID NO: 27970 - RNA, 21 nt, synthetic construct
  source 1..21: mol_type = other RNA; note = Description of Artificial Sequence: Synthetic oligonucleotide
tcatggtttagccccaactaa

SEQ ID NO: 27971 - RNA, 21 nt, synthetic construct
  source 1..21: mol_type = other RNA; note = Description of Artificial Sequence: Synthetic oligonucleotide
gtcatggtttagccccaacta

SEQ ID NO: 27972 - RNA, 21 nt, synthetic construct
  source 1..21: mol_type = other RNA; note = Description of Artificial Sequence: Synthetic oligonucleotide
tgtcatggtttagccccaact

SEQ ID NO: 27973 - RNA, 21 nt, synthetic construct
  source 1..21: mol_type = other RNA; note = Description of Artificial Sequence: Synthetic oligonucleotide
ctgtcatggtttagccccaac

SEQ ID NO: 27974 - RNA, 21 nt, synthetic construct
  source 1..21: mol_type = other RNA; note = Description of Artificial Sequence: Synthetic oligonucleotide
tctgtcatggtttagccccaa

SEQ ID NO: 27975 - RNA, 21 nt, synthetic construct
  source 1..21: mol_type = other RNA; note = Description of Artificial Sequence: Synthetic oligonucleotide
ttctgtcatggtttagcccca

SEQ ID NO: 27976 - RNA, 21 nt, synthetic construct
  source 1..21: mol_type = other RNA; note = Description of Artificial Sequence: Synthetic oligonucleotide
cttctgtcatggtttagcccc

SEQ ID NO: 27977 - RNA, 21 nt, synthetic construct
  source 1..21: mol_type = other RNA; note = Description of Artificial Sequence: Synthetic oligonucleotide
acttctgtcatggtttagccc

SEQ ID NO: 27978 - RNA, 21 nt, synthetic construct
  source 1..21: mol_type = other RNA; note = Description of Artificial Sequence: Synthetic oligonucleotide
cacttctgtcatggtttagcc

SEQ ID NO: 27979 - RNA, 21 nt, synthetic construct
  source 1..21: mol_type = other RNA; note = Description of Artificial Sequence: Synthetic oligonucleotide
ccacttctgtcatggtttagc

SEQ ID NO: 27980 - RNA, 21 nt, synthetic construct
  source 1..21: mol_type = other RNA; note = Description of Artificial Sequence: Synthetic oligonucleotide
cccacttctgtcatggtttag

SEQ ID NO: 27981 - RNA, 21 nt, synthetic construct
  source 1..21: mol_type = other RNA; note = Description of Artificial Sequence: Synthetic oligonucleotide
ccccacttctgtcatggttta

SEQ ID NO: 27982 - RNA, 21 nt, synthetic construct
  source 1..21: mol_type = other RNA; note = Description of Artificial Sequence: Synthetic oligonucleotide
tccccacttctgtcatggttt

SEQ ID NO: 27983 - RNA, 21 nt, synthetic construct
  source 1..21: mol_type = other RNA; note = Description of Artificial Sequence: Synthetic oligonucleotide
ttccccacttctgtcatggtt

SEQ ID NO: 27984 - RNA, 21 nt, synthetic construct
  source 1..21: mol_type = other RNA; note = Description of Artificial Sequence: Synthetic oligonucleotide
cttccccacttctgtcatggt

SEQ ID NO: 27985 - RNA, 21 nt, synthetic construct
  source 1..21: mol_type = other RNA; note = Description of Artificial Sequence: Synthetic oligonucleotide
acttccccacttctgtcatgg

SEQ ID NO: 27986 - RNA, 21 nt, synthetic construct
  source 1..21: mol_type = other RNA; note = Description of Artificial Sequence: Synthetic oligonucleotide
aacttccccacttctgtcatg

SEQ ID NO: 27987 - RNA, 21 nt, synthetic construct
  source 1..21: mol_type = other RNA; note = Description of Artificial Sequence: Synthetic oligonucleotide
gaacttccccacttctgtcat

SEQ ID NO: 27988 - RNA, 21 nt, synthetic construct
  source 1..21: mol_type = other RNA; note = Description of Artificial Sequence: Synthetic oligonucleotide
tgaacttccccacttctgtca

SEQ ID NO: 27989 - RNA, 21 nt, synthetic construct
  source 1..21: mol_type = other RNA; note = Description of Artificial Sequence: Synthetic oligonucleotide
ttgaacttccccacttctgtc

SEQ ID NO: 27990 - RNA, 21 nt, synthetic construct
  source 1..21: mol_type = other RNA; note = Description of Artificial Sequence: Synthetic oligonucleotide
attgaacttccccacttctgt

SEQ ID NO: 27991 - RNA, 21 nt, synthetic construct
  source 1..21: mol_type = other RNA; note = Description of Artificial Sequence: Synthetic oligonucleotide
cattgaacttccccacttctg

SEQ ID NO: 27992 - RNA, 21 nt, synthetic construct
  source 1..21: mol_type = other RNA; note = Description of Artificial Sequence: Synthetic oligonucleotide
acattgaacttccccacttct

SEQ ID NO: 27993 - RNA, 21 nt, synthetic construct
  source 1..21: mol_type = other RNA; note = Description of Artificial Sequence: Synthetic oligonucleotide
gacattgaacttccccacttc

SEQ ID NO: 27994 - RNA, 21 nt, synthetic construct
  source 1..21: mol_type = other RNA; note = Description of Artificial Sequence: Synthetic oligonucleotide
ggacattgaacttccccactt

SEQ ID NO: 27995 - RNA, 21 nt, synthetic construct
  source 1..21: mol_type = other RNA; note = Description of Artificial Sequence: Synthetic oligonucleotide
aggacattgaacttccccact

SEQ ID NO: 27996 - RNA, 21 nt, synthetic construct
  source 1..21: mol_type = other RNA; note = Description of Artificial Sequence: Synthetic oligonucleotide
aaggacattgaacttccccac

SEQ ID NO: 27997 - RNA, 21 nt, synthetic construct
  source 1..21: mol_type = other RNA; note = Description of Artificial Sequence: Synthetic oligonucleotide
taaggacattgaacttcccca

SEQ ID NO: 27998 - RNA, 21 nt, synthetic construct
  source 1..21: mol_type = other RNA; note = Description of Artificial Sequence: Synthetic oligonucleotide
ttaaggacattgaacttcccc

SEQ ID NO: 27999 - RNA, 21 nt, synthetic construct
  source 1..21: mol_type = other RNA; note = Description of Artificial Sequence: Synthetic oligonucleotide
tttaaggacattgaacttccc

SEQ ID NO: 28000 - RNA, 21 nt, synthetic construct
  source 1..21: mol_type = other RNA; note = Description of Artificial Sequence: Synthetic oligonucleotide
atttaaggacattgaacttcc

SEQ ID NO: 28001 - RNA, 21 nt, synthetic construct
  source 1..21: mol_type = other RNA; note = Description of Artificial Sequence: Synthetic oligonucleotide
gatttaaggacattgaacttc

SEQ ID NO: 28002 - RNA, 21 nt, synthetic construct
  source 1..21: mol_type = other RNA; note = Description of Artificial Sequence: Synthetic oligonucleotide
ggatttaaggacattgaactt

SEQ ID NO: 28003 - RNA, 21 nt, synthetic construct
  source 1..21: mol_type = other RNA; note = Description of Artificial Sequence: Synthetic oligonucleotide
tggatttaaggacattgaact

SEQ ID NO: 28004 - RNA, 21 nt, synthetic construct
  source 1..21: mol_type = other RNA; note = Description of Artificial Sequence: Synthetic oligonucleotide
atggatttaaggacattgaac

SEQ ID NO: 28005 - RNA, 21 nt, synthetic construct
  source 1..21: mol_type = other RNA; note = Description of Artificial Sequence: Synthetic oligonucleotide
gatggatttaaggacattgaa

SEQ ID NO: 28006 - RNA, 21 nt, synthetic construct
  source 1..21: mol_type = other RNA; note = Description of Artificial Sequence: Synthetic oligonucleotide
agatggatttaaggacattga

SEQ ID NO: 28007 - RNA, 21 nt, synthetic construct
  source 1..21: mol_type = other RNA; note = Description of Artificial Sequence: Synthetic oligonucleotide
aagatggatttaaggacattg

SEQ ID NO: 28008 - RNA, 21 nt, synthetic construct
  source 1..21: mol_type = other RNA; note = Description of Artificial Sequence: Synthetic oligonucleotide
taagatggatttaaggacatt

SEQ ID NO: 28009 - RNA, 21 nt, synthetic construct
  source 1..21: mol_type = other RNA; note = Description of Artificial Sequence: Synthetic oligonucleotide
gtaagatggatttaaggacat

SEQ ID NO: 28010 - RNA, 21 nt, synthetic construct
  source 1..21: mol_type = other RNA; note = Description of Artificial Sequence: Synthetic oligonucleotide
agtaagatggatttaaggaca

SEQ ID NO: 28011 - RNA, 21 nt, synthetic construct
  source 1..21: mol_type = other RNA; note = Description of Artificial Sequence: Synthetic oligonucleotide
aagtaagatggatttaaggac

SEQ ID NO: 28012 - RNA, 21 nt, synthetic construct
  source 1..21: mol_type = other RNA; note = Description of Artificial Sequence: Synthetic oligonucleotide
caagtaagatggatttaagga

SEQ ID NO: 28013 - RNA, 21 nt, synthetic construct
  source 1..21: mol_type = other RNA; note = Description of Artificial Sequence: Synthetic oligonucleotide
gcaagtaagatggatttaagg

SEQ ID NO: 28014 - RNA, 21 nt, synthetic construct
  source 1..21: mol_type = other RNA; note = Description of Artificial Sequence: Synthetic oligonucleotide
ggcaagtaagatggatttaag

SEQ ID NO: 28015 - RNA, 21 nt, synthetic construct
  source 1..21: mol_type = other RNA; note = Description of Artificial Sequence: Synthetic oligonucleotide
tggcaagtaagatggatttaa

SEQ ID NO: 28016 - RNA, 21 nt, synthetic construct
  source 1..21: mol_type = other RNA; note = Description of Artificial Sequence: Synthetic oligonucleotide
ttggcaagtaagatggattta

SEQ ID NO: 28017 - RNA, 21 nt, synthetic construct
  source 1..21: mol_type = other RNA; note = Description of Artificial Sequence: Synthetic oligonucleotide
gttggcaagtaagatggattt

SEQ ID NO: 28018 - RNA, 21 nt, synthetic construct
  source 1..21: mol_type = other RNA; note = Description of Artificial Sequence: Synthetic oligonucleotide
tgttggcaagtaagatggatt

SEQ ID NO: 28019 - RNA, 21 nt, synthetic construct
  source 1..21: mol_type = other RNA; note = Description of Artificial Sequence: Synthetic oligonucleotide
ctgttggcaagtaagatggat

SEQ ID NO: 28020 - RNA, 21 nt, synthetic construct
  source 1..21: mol_type = other RNA; note = Description of Artificial Sequence: Synthetic oligonucleotide
cctgttggcaagtaagatgga

SEQ ID NO: 28021 - RNA, 21 nt, synthetic construct
  source 1..21: mol_type = other RNA; note = Description of Artificial Sequence: Synthetic oligonucleotide
acctgttggcaagtaagatgg

SEQ ID NO: 28022 - RNA, 21 nt, synthetic construct
  source 1..21: mol_type = other RNA; note = Description of Artificial Sequence: Synthetic oligonucleotide
tacctgttggcaagtaagatg

SEQ ID NO: 28023 - RNA, 21 nt, synthetic construct
  source 1..21: mol_type = other RNA; note = Description of Artificial Sequence: Synthetic oligonucleotide
ttacctgttggcaagtaagat

SEQ ID NO: 28024 - RNA, 21 nt, synthetic construct
  source 1..21: mol_type = other RNA; note = Description of Artificial Sequence: Synthetic oligonucleotide
cttacctgttggcaagtaaga

SEQ ID NO: 28025 - RNA, 21 nt, synthetic construct
  source 1..21: mol_type = other RNA; note = Description of Artificial Sequence: Synthetic oligonucleotide
tcttacctgttggcaagtaag

SEQ ID NO: 28026 - RNA, 21 nt, synthetic construct
  source 1..21: mol_type = other RNA; note = Description of Artificial Sequence: Synthetic oligonucleotide
ctcttacctgttggcaagtaa

SEQ ID NO: 28027 - RNA, 21 nt, synthetic construct
  source 1..21: mol_type = other RNA; note = Description of Artificial Sequence: Synthetic oligonucleotide
cctcttacctgttggcaagta

SEQ ID NO: 28028 - RNA, 21 nt, synthetic construct
  source 1..21: mol_type = other RNA; note = Description of Artificial Sequence: Synthetic oligonucleotide
tcctcttacctgttggcaagt

SEQ ID NO: 28029 - RNA, 21 nt, synthetic construct
  source 1..21: mol_type = other RNA; note = Description of Artificial Sequence: Synthetic oligonucleotide
ttcctcttacctgttggcaag

SEQ ID NO: 28030 - RNA, 21 nt, synthetic construct
  source 1..21: mol_type = other RNA; note = Description of Artificial Sequence: Synthetic oligonucleotide
cttcctcttacctgttggcaa

SEQ ID NO: 28031 - RNA, 21 nt, synthetic construct
  source 1..21: mol_type = other RNA; note = Description of Artificial Sequence: Synthetic oligonucleotide
gcttcctcttacctgttggca

SEQ ID NO: 28032 - RNA, 21 nt, synthetic construct
  source 1..21: mol_type = other RNA; note = Description of Artificial Sequence: Synthetic oligonucleotide
agcttcctcttacctgttggc

SEQ ID NO: 28033 - RNA, 21 nt, synthetic construct
  source 1..21: mol_type = other RNA; note = Description of Artificial Sequence: Synthetic oligonucleotide
aagcttcctcttacctgttgg

SEQ ID NO: 28034 - RNA, 21 nt, synthetic construct
  source 1..21: mol_type = other RNA; note = Description of Artificial Sequence: Synthetic oligonucleotide
taagcttcctcttacctgttg

SEQ ID NO: 28035 - RNA, 21 nt, synthetic construct
  source 1..21: mol_type = other RNA; note = Description of Artificial Sequence: Synthetic oligonucleotide
gtaagcttcctcttacctgtt

SEQ ID NO: 28036 - RNA, 21 nt, synthetic construct
  source 1..21: mol_type = other RNA; note = Description of Artificial Sequence: Synthetic oligonucleotide
tgtaagcttcctcttacctgt

SEQ ID NO: 28037 - RNA, 21 nt, synthetic construct
  source 1..21: mol_type = other RNA; note = Description of Artificial Sequence: Synthetic oligonucleotide
atgtaagcttcctcttacctg

SEQ ID NO: 28038 - RNA, 21 nt, synthetic construct
  source 1..21: mol_type = other RNA; note = Description of Artificial Sequence: Synthetic oligonucleotide
aatgtaagcttcctcttacct

SEQ ID NO: 28039 - RNA, 21 nt, synthetic construct
  source 1..21: mol_type = other RNA; note = Description of Artificial Sequence: Synthetic oligonucleotide
taatgtaagcttcctcttacc

SEQ ID NO: 28040 - RNA, 21 nt, synthetic construct
  source 1..21: mol_type = other RNA; note = Description of Artificial Sequence: Synthetic oligonucleotide
gtaatgtaagcttcctcttac

SEQ ID NO: 28041 - RNA, 21 nt, synthetic construct
  source 1..21: mol_type = other RNA; note = Description of Artificial Sequence: Synthetic oligonucleotide
tgtaatgtaagcttcctctta

SEQ ID NO: 28042 - RNA, 21 nt, synthetic construct
  source 1..21: mol_type = other RNA; note = Description of Artificial Sequence: Synthetic oligonucleotide
atgtaatgtaagcttcctctt

SEQ ID NO: 28043 - RNA, 21 nt, synthetic construct
  source 1..21: mol_type = other RNA; note = Description of Artificial Sequence: Synthetic oligonucleotide
catgtaatgtaagcttcctct

SEQ ID NO: 28044 - RNA, 21 nt, synthetic construct
  source 1..21: mol_type = other RNA; note = Description of Artificial Sequence: Synthetic oligonucleotide
acatgtaatgtaagcttcctc

SEQ ID NO: 28045 - RNA, 21 nt, synthetic construct
  source 1..21: mol_type = other RNA; note = Description of Artificial Sequence: Synthetic oligonucleotide
gacatgtaatgtaagcttcct

SEQ ID NO: 28046 - RNA, 21 nt, synthetic construct
  source 1..21: mol_type = other RNA; note = Description of Artificial Sequence: Synthetic oligonucleotide
ggacatgtaatgtaagcttcc

SEQ ID NO: 28047 - RNA, 21 nt, synthetic construct
  source 1..21: mol_type = other RNA; note = Description of Artificial Sequence: Synthetic oligonucleotide
tggacatgtaatgtaagcttc

SEQ ID NO: 28048 - RNA, 21 nt, synthetic construct
  source 1..21: mol_type = other RNA; note = Description of Artificial Sequence: Synthetic oligonucleotide
ctggacatgtaatgtaagctt

SEQ ID NO: 28049 - RNA, 21 nt, synthetic construct
  source 1..21: mol_type = other RNA; note = Description of Artificial Sequence: Synthetic oligonucleotide
actggacatgtaatgtaagct

SEQ ID NO: 28050 - RNA, 21 nt, synthetic construct
  source 1..21: mol_type = other RNA; note = Description of Artificial Sequence: Synthetic oligonucleotide
gactggacatgtaatgtaagc

SEQ ID NO: 28051 - RNA, 21 nt, synthetic construct
  source 1..21: mol_type = other RNA; note = Description of Artificial Sequence: Synthetic oligonucleotide
ggactggacatgtaatgtaag

SEQ ID NO: 28052 - RNA, 21 nt, synthetic construct
  source 1..21: mol_type = other RNA; note = Description of Artificial Sequence: Synthetic oligonucleotide
tggactggacatgtaatgtaa

SEQ ID NO: 28053 - RNA, 21 nt, synthetic construct
  source 1..21: mol_type = other RNA; note = Description of Artificial Sequence: Synthetic oligonucleotide
gtggactggacatgtaatgta

SEQ ID NO: 28054 - RNA, 21 nt, synthetic construct
  source 1..21: mol_type = other RNA; note = Description of Artificial Sequence: Synthetic oligonucleotide
tgtggactggacatgtaatgt

SEQ ID NO: 28055 - RNA, 21 nt, synthetic construct
  source 1..21: mol_type = other RNA; note = Description of Artificial Sequence: Synthetic oligonucleotide
atgtggactggacatgtaatg

SEQ ID NO: 28056 - RNA, 21 nt, synthetic construct
  source 1..21: mol_type = other RNA; note = Description of Artificial Sequence: Synthetic oligonucleotide
aatgtggactggacatgtaat

SEQ ID NO: 28057 - RNA, 21 nt, synthetic construct
  source 1..21: mol_type = other RNA; note = Description of Artificial Sequence: Synthetic oligonucleotide
aaatgtggactggacatgtaa

SEQ ID NO: 28058 - RNA, 21 nt, synthetic construct
  source 1..21: mol_type = other RNA; note = Description of Artificial Sequence: Synthetic oligonucleotide
taaatgtggactggacatgta

SEQ ID NO: 28059 - RNA, 21 nt, synthetic construct
  source 1..21: mol_type = other RNA; note = Description of Artificial Sequence: Synthetic oligonucleotide
ttaaatgtggactggacatgt

SEQ ID NO: 28060 - RNA, 21 nt, synthetic construct
  source 1..21: mol_type = other RNA; note = Description of Artificial Sequence: Synthetic oligonucleotide
tttaaatgtggactggacatg

SEQ ID NO: 28061 - RNA, 21 nt, synthetic construct
  source 1..21: mol_type = other RNA; note = Description of Artificial Sequence: Synthetic oligonucleotide
ctttaaatgtggactggacat

SEQ ID NO: 28062 - RNA, 21 nt, synthetic construct
  source 1..21: mol_type = other RNA; note = Description of Artificial Sequence: Synthetic oligonucleotide
tctttaaatgtggactggaca

SEQ ID NO: 28063 - RNA, 21 nt, synthetic construct
  source 1..21: mol_type = other RNA; note = Description of Artificial Sequence: Synthetic oligonucleotide
ctctttaaatgtggactggac

SEQ ID NO: 28064 - RNA, 21 nt, synthetic construct
  source 1..21: mol_type = other RNA; note = Description of Artificial Sequence: Synthetic oligonucleotide
gctctttaaatgtggactgga

SEQ ID NO: 28065 - RNA, 21 nt, synthetic construct
  source 1..21: mol_type = other RNA; note = Description of Artificial Sequence: Synthetic oligonucleotide
tgctctttaaatgtggactgg

SEQ ID NO: 28066 - RNA, 21 nt, synthetic construct
  source 1..21: mol_type = other RNA; note = Description of Artificial Sequence: Synthetic oligonucleotide
gtgctctttaaatgtggactg

SEQ ID NO: 28067 - RNA, 21 nt, synthetic construct
  source 1..21: mol_type = other RNA; note = Description of Artificial Sequence: Synthetic oligonucleotide
agtgctctttaaatgtggact

SEQ ID NO: 28068 - RNA, 21 nt, synthetic construct
  source 1..21: mol_type = other RNA; note = Description of Artificial Sequence: Synthetic oligonucleotide
aagtgctctttaaatgtggac

SEQ ID NO: 28069 - RNA, 21 nt, synthetic construct
  source 1..21: mol_type = other RNA; note = Description of Artificial Sequence: Synthetic oligonucleotide
taagtgctctttaaatgtgga

SEQ ID NO: 28070 - RNA, 21 nt, synthetic construct
  source 1..21: mol_type = other RNA; note = Description of Artificial Sequence: Synthetic oligonucleotide
gtaagtgctctttaaatgtgg

SEQ ID NO: 28071 - RNA, 21 nt, synthetic construct
  source 1..21: mol_type = other RNA; note = Description of Artificial Sequence: Synthetic oligonucleotide
agtaagtgctctttaaatgtg

SEQ ID NO: 28072 - RNA, 21 nt, synthetic construct
  source 1..21: mol_type = other RNA; note = Description of Artificial Sequence: Synthetic oligonucleotide
cagtaagtgctctttaaatgt

SEQ ID NO: 28073 - RNA, 21 nt, synthetic construct
  source 1..21: mol_type = other RNA; note = Description of Artificial Sequence: Synthetic oligonucleotide
acagtaagtgctctttaaatg

SEQ ID NO: 28074 - RNA, 21 nt, synthetic construct
  source 1..21: mol_type = other RNA; note = Description of Artificial Sequence: Synthetic oligonucleotide
cacagtaagtgctctttaaat

SEQ ID NO: 28075 - RNA, 21 nt, synthetic construct
  source 1..21: mol_type = other RNA; note = Description of Artificial Sequence: Synthetic oligonucleotide
ccacagtaagtgctctttaaa

SEQ ID NO: 28076 - RNA, 21 nt, synthetic construct
  source 1..21: mol_type = other RNA; note = Description of Artificial Sequence: Synthetic oligonucleotide
tccacagtaagtgctctttaa

SEQ ID NO: 28077 - RNA, 21 nt, synthetic construct
  source 1..21: mol_type = other RNA; note = Description of Artificial Sequence: Synthetic oligonucleotide
ttccacagtaagtgctcttta

SEQ ID NO: 28078 - RNA, 21 nt, synthetic construct
  source 1..21: mol_type = other RNA; note = Description of Artificial Sequence: Synthetic oligonucleotide
gttccacagtaagtgctcttt

SEQ ID NO: 28079 - RNA, 21 nt, synthetic construct
  source 1..21: mol_type = other RNA; note = Description of Artificial Sequence: Synthetic oligonucleotide
tgttccacagtaagtgctctt

SEQ ID NO: 28080 - RNA, 21 nt, synthetic construct
  source 1..21: mol_type = other RNA; note = Description of Artificial Sequence: Synthetic oligonucleotide
ttgttccacagtaagtgctct

SEQ ID NO: 28081 - RNA, 21 nt, synthetic construct
  source 1..21: mol_type = other RNA; note = Description of Artificial Sequence: Synthetic oligonucleotide
cttgttccacagtaagtgctc

SEQ ID NO: 28082 - RNA, 21 nt, synthetic construct
  source 1..21: mol_type = other RNA; note = Description of Artificial Sequence: Synthetic oligonucleotide
gcttgttccacagtaagtgct

SEQ ID NO: 28083 - RNA, 21 nt, synthetic construct
  source 1..21: mol_type = other RNA; note = Description of Artificial Sequence: Synthetic oligonucleotide
ggcttgttccacagtaagtgc

SEQ ID NO: 28084 - RNA, 21 nt, synthetic construct
  source 1..21: mol_type = other RNA; note = Description of Artificial Sequence: Synthetic oligonucleotide
aggcttgttccacagtaagtg

SEQ ID NO: 28085 - RNA, 21 nt, synthetic construct
  source 1..21: mol_type = other RNA; note = Description of Artificial Sequence: Synthetic oligonucleotide
aaggcttgttccacagtaagt

SEQ ID NO: 28086 - RNA, 21 nt, synthetic construct
  source 1..21: mol_type = other RNA; note = Description of Artificial Sequence: Synthetic oligonucleotide
gaaggcttgttccacagtaag

SEQ ID NO: 28087 - RNA, 21 nt, synthetic construct
  source 1..21: mol_type = other RNA; note = Description of Artificial Sequence: Synthetic oligonucleotide
tgaaggcttgttccacagtaa

SEQ ID NO: 28088 - RNA, 21 nt, synthetic construct
  source 1..21: mol_type = other RNA; note = Description of Artificial Sequence: Synthetic oligonucleotide
ctgaaggcttgttccacagta

SEQ ID NO: 28089 - RNA, 21 nt, synthetic construct
  source 1..21: mol_type = other RNA; note = Description of Artificial Sequence: Synthetic oligonucleotide
gctgaaggcttgttccacagt

SEQ ID NO: 28090 - RNA, 21 nt, synthetic construct
  source 1..21: mol_type = other RNA; note = Description of Artificial Sequence: Synthetic oligonucleotide
ggctgaaggcttgttccacag

SEQ ID NO: 28091 - RNA, 21 nt, synthetic construct
  source 1..21: mol_type = other RNA; note = Description of Artificial Sequence: Synthetic oligonucleotide
tggctgaaggcttgttccaca

SEQ ID NO: 28092 - RNA, 21 nt, synthetic construct
  source 1..21: mol_type = other RNA; note = Description of Artificial Sequence: Synthetic oligonucleotide
ttggctgaaggcttgttccac

SEQ ID NO: 28093 - RNA, 21 nt, synthetic construct
  source 1..21: mol_type = other RNA; note = Description of Artificial Sequence: Synthetic oligonucleotide
tttggctgaaggcttgttcca

SEQ ID NO: 28094 - RNA, 21 nt, synthetic construct
  source 1..21: mol_type = other RNA; note = Description of Artificial Sequence: Synthetic oligonucleotide
gtttggctgaaggcttgttcc

SEQ ID NO: 28095 - RNA, 21 nt, synthetic construct
  source 1..21: mol_type = other RNA; note = Description of Artificial Sequence: Synthetic oligonucleotide
tgtttggctgaaggcttgttc

SEQ ID NO: 28096 - RNA, 21 nt, synthetic construct
  source 1..21: mol_type = other RNA; note = Description of Artificial Sequence: Synthetic oligonucleotide
ttgtttggctgaaggcttgtt

SEQ ID NO: 28097 - RNA, 21 nt, synthetic construct
  source 1..21: mol_type = other RNA; note = Description of Artificial Sequence: Synthetic oligonucleotide
attgtttggctgaaggcttgt

SEQ ID NO: 28098 - RNA, 21 nt, synthetic construct
  source 1..21: mol_type = other RNA; note = Description of Artificial Sequence: Synthetic oligonucleotide
cattgtttggctgaaggcttg

SEQ ID NO: 28099 - RNA, 21 nt, synthetic construct
  source 1..21: mol_type = other RNA; note = Description of Artificial Sequence: Synthetic oligonucleotide
ccattgtttggctgaaggctt

SEQ ID NO: 28100 - RNA, 21 nt, synthetic construct
  source 1..21: mol_type = other RNA; note = Description of Artificial Sequence: Synthetic oligonucleotide
cccattgtttggctgaaggct

SEQ ID NO: 28101 - RNA, 21 nt, synthetic construct
  source 1..21: mol_type = other RNA; note = Description of Artificial Sequence: Synthetic oligonucleotide
ccccattgtttggctgaaggc

SEQ ID NO: 28102 - RNA, 21 nt, synthetic construct
  source 1..21: mol_type = other RNA; note = Description of Artificial Sequence: Synthetic oligonucleotide
tccccattgtttggctgaagg

SEQ ID NO: 28103 - RNA, 21 nt, synthetic construct
  source 1..21: mol_type = other RNA; note = Description of Artificial Sequence: Synthetic oligonucleotide
atccccattgtttggctgaag

SEQ ID NO: 28104 - RNA, 21 nt, synthetic construct
  source 1..21: mol_type = other RNA; note = Description of Artificial Sequence: Synthetic oligonucleotide
tatccccattgtttggctgaa

SEQ ID NO: 28105 - RNA, 21 nt, synthetic construct
  source 1..21: mol_type = other RNA; note = Description of Artificial Sequence: Synthetic oligonucleotide
ctatccccattgtttggctga

SEQ ID NO: 28106 - RNA, 21 nt, synthetic construct
  source 1..21: mol_type = other RNA; note = Description of Artificial Sequence: Synthetic oligonucleotide
tctatccccattgtttggctg

SEQ ID NO: 28107 - RNA, 21 nt, synthetic construct
  source 1..21: mol_type = other RNA; note = Description of Artificial Sequence: Synthetic oligonucleotide
ttctatccccattgtttggct

SEQ ID NO: 28108 - RNA, 21 nt, synthetic construct
  source 1..21: mol_type = other RNA; note = Description of Artificial Sequence: Synthetic oligonucleotide
tttctatccccattgtttggc

SEQ ID NO: 28109 - RNA, 21 nt, synthetic construct
  source 1..21: mol_type = other RNA; note = Description of Artificial Sequence: Synthetic oligonucleotide
ttttctatccccattgtttgg

SEQ ID NO: 28110 - RNA, 21 nt, synthetic construct
  source 1..21: mol_type = other RNA; note = Description of Artificial Sequence: Synthetic oligonucleotide
cttttctatccccattgtttg

SEQ ID NO: 28111 - RNA, 21 nt, synthetic construct
  source 1..21: mol_type = other RNA; note = Description of Artificial Sequence: Synthetic oligonucleotide
acttttctatccccattgttt

SEQ ID NO: 28112 - RNA, 21 nt, synthetic construct
  source 1..21: mol_type = other RNA; note = Description of Artificial Sequence: Synthetic oligonucleotide
tacttttctatccccattgtt

SEQ ID NO: 28113 - RNA, 21 nt, synthetic construct
  source 1..21: mol_type = other RNA; note = Description of Artificial Sequence: Synthetic oligonucleotide
ctacttttctatccccattgt

SEQ ID NO: 28114 - RNA, 21 nt, synthetic construct
  source 1..21: mol_type = other RNA; note = Description of Artificial Sequence: Synthetic oligonucleotide
cctacttttctatccccattg

SEQ ID NO: 28115 - RNA, 21 nt, synthetic construct
  source 1..21: mol_type = other RNA; note = Description of Artificial Sequence: Synthetic oligonucleotide
acctacttttctatccccatt

SEQ ID NO: 28116 - RNA, 21 nt, synthetic construct
  source 1..21: mol_type = other RNA; note = Description of Artificial Sequence: Synthetic oligonucleotide
tacctacttttctatccccat

SEQ ID NO: 28117 - RNA, 21 nt, synthetic construct
  source 1..21: mol_type = other RNA; note = Description of Artificial Sequence: Synthetic oligonucleotide
ttacctacttttctatcccca

SEQ ID NO: 28118 - RNA, 21 nt, synthetic construct
  source 1..21: mol_type = other RNA; note = Description of Artificial Sequence: Synthetic oligonucleotide
cttacctacttttctatcccc

SEQ ID NO: 28119 - RNA, 21 nt, synthetic construct
  source 1..21: mol_type = other RNA; note = Description of Artificial Sequence: Synthetic oligonucleotide
tcttacctacttttctatccc

SEQ ID NO: 28120 - RNA, 21 nt, synthetic construct
  source 1..21: mol_type = other RNA; note = Description of Artificial Sequence: Synthetic oligonucleotide
gtcttacctacttttctatcc

SEQ ID NO: 28121 - RNA, 21 nt, synthetic construct
  source 1..21: mol_type = other RNA; note = Description of Artificial Sequence: Synthetic oligonucleotide
agtcttacctacttttctatc

SEQ ID NO: 28122 - RNA, 21 nt, synthetic construct
  source 1..21: mol_type = other RNA; note = Description of Artificial Sequence: Synthetic oligonucleotide
gagtcttacctacttttctat

SEQ ID NO: 28123 - RNA, 21 nt, synthetic construct
  source 1..21: mol_type = other RNA; note = Description of Artificial Sequence: Synthetic oligonucleotide
tgagtcttacctacttttcta

SEQ ID NO: 28124 - RNA, 21 nt, synthetic construct
  source 1..21: mol_type = other RNA; note = Description of Artificial Sequence: Synthetic oligonucleotide
ctgagtcttacctacttttct

SEQ ID NO: 28125 - RNA, 21 nt, synthetic construct
  source 1..21: mol_type = other RNA; note = Description of Artificial Sequence: Synthetic oligonucleotide
gctgagtcttacctacttttc

SEQ ID NO: 28126 - RNA, 21 nt, synthetic construct
  source 1..21: mol_type = other RNA; note = Description of Artificial Sequence: Synthetic oligonucleotide
ggctgagtcttacctactttt

SEQ ID NO: 28127 - RNA, 21 nt, synthetic construct
  source 1..21: mol_type = other RNA; note = Description of Artificial Sequence: Synthetic oligonucleotide
aggctgagtcttacctacttt

SEQ ID NO: 28128 - RNA, 21 nt, synthetic construct
  source 1..21: mol_type = other RNA; note = Description of Artificial Sequence: Synthetic oligonucleotide
aaggctgagtcttacctactt

SEQ ID NO: 28129 - RNA, 21 nt, synthetic construct
  source 1..21: mol_type = other RNA; note = Description of Artificial Sequence: Synthetic oligonucleotide
aaaggctgagtcttacctact

SEQ ID NO: 28130 - RNA, 21 nt, synthetic construct
  source 1..21: mol_type = other RNA; note = Description of Artificial Sequence: Synthetic oligonucleotide
caaaggctgagtcttacctac

SEQ ID NO: 28131 - RNA, 21 nt, synthetic construct
  source 1..21: mol_type = other RNA; note = Description of Artificial Sequence: Synthetic oligonucleotide
acaaaggctgagtcttaccta

SEQ ID NO: 28132 - RNA, 21 nt, synthetic construct
  source 1..21: mol_type = other RNA; note = Description of Artificial Sequence: Synthetic oligonucleotide
gacaaaggctgagtcttacct

SEQ ID NO: 28133 - RNA, 21 nt, synthetic construct
  source 1..21: mol_type = other RNA; note = Description of Artificial Sequence: Synthetic oligonucleotide
ggacaaaggctgagtcttacc

SEQ ID NO: 28134 - RNA, 21 nt, synthetic construct
  source 1..21: mol_type = other RNA; note = Description of Artificial Sequence: Synthetic oligonucleotide
tggacaaaggctgagtcttac

SEQ ID NO: 28135 - RNA, 21 nt, synthetic construct
  source 1..21: mol_type = other RNA; note = Description of Artificial Sequence: Synthetic oligonucleotide
ctggacaaaggctgagtctta

SEQ ID NO: 28136 - RNA, 21 nt, synthetic construct
  source 1..21: mol_type = other RNA; note = Description of Artificial Sequence: Synthetic oligonucleotide
tctggacaaaggctgagtctt

SEQ ID NO: 28137 - RNA, 21 nt, synthetic construct
  source 1..21: mol_type = other RNA; note = Description of Artificial Sequence: Synthetic oligonucleotide
ctctggacaaaggctgagtct

SEQ ID NO: 28138 - RNA, 21 nt, synthetic construct
  source 1..21: mol_type = other RNA; note = Description of Artificial Sequence: Synthetic oligonucleotide
tctctggacaaaggctgagtc

SEQ ID NO: 28139 - RNA, 21 nt, synthetic construct
  source 1..21: mol_type = other RNA; note = Description of Artificial Sequence: Synthetic oligonucleotide
ttctctggacaaaggctgagt

SEQ ID NO: 28140 - RNA, 21 nt, synthetic construct
  source 1..21: mol_type = other RNA; note = Description of Artificial Sequence: Synthetic oligonucleotide
cttctctggacaaaggctgag

SEQ ID NO: 28141 - RNA, 21 nt, synthetic construct
  source 1..21: mol_type = other RNA; note = Description of Artificial Sequence: Synthetic oligonucleotide
gcttctctggacaaaggctga

SEQ ID NO: 28142 - RNA, 21 nt, synthetic construct
  source 1..21: mol_type = other RNA; note = Description of Artificial Sequence: Synthetic oligonucleotide
agcttctctggacaaaggctg

SEQ ID NO: 28143 - RNA, 21 nt, synthetic construct
  source 1..21: mol_type = other RNA; note = Description of Artificial Sequence: Synthetic oligonucleotide
gagcttctctggacaaaggct

SEQ ID NO: 28144 - RNA, 21 nt, synthetic construct
  source 1..21: mol_type = other RNA; note = Description of Artificial Sequence: Synthetic oligonucleotide
tgagcttctctggacaaaggc

SEQ ID NO: 28145 - RNA, 21 nt, synthetic construct
  source 1..21: mol_type = other RNA; note = Description of Artificial Sequence: Synthetic oligonucleotide
ctgagcttctctggacaaagg

SEQ ID NO: 28146 - RNA, 21 nt, synthetic construct
  source 1..21: mol_type = other RNA; note = Description of Artificial Sequence: Synthetic oligonucleotide
cctgagcttctctggacaaag

SEQ ID NO: 28147 - RNA, 21 nt, synthetic construct
  source 1..21: mol_type = other RNA; note = Description of Artificial Sequence: Synthetic oligonucleotide
ccctgagcttctctggacaaa

SEQ ID NO: 28148 - RNA, 21 nt, synthetic construct
  source 1..21: mol_type = other RNA; note = Description of Artificial Sequence: Synthetic oligonucleotide
accctgagcttctctggacaa

SEQ ID NO: 28149 - RNA, 21 nt, synthetic construct
  source 1..21: mol_type = other RNA; note = Description of Artificial Sequence: Synthetic oligonucleotide
taccctgagcttctctggaca

SEQ ID NO: 28150 - RNA, 21 nt, synthetic construct
  source 1..21: mol_type = other RNA; note = Description of Artificial Sequence: Synthetic oligonucleotide
ataccctgagcttctctggac

SEQ ID NO: 28151 - RNA, 21 nt, synthetic construct
  source 1..21: mol_type = other RNA; note = Description of Artificial Sequence: Synthetic oligonucleotide
tataccctgagcttctctgga

SEQ ID NO: 28152 - RNA, 21 nt, synthetic construct
  source 1..21: mol_type = other RNA; note = Description of Artificial Sequence: Synthetic oligonucleotide
ctataccctgagcttctctgg

SEQ ID NO: 28153 - RNA, 21 nt, synthetic construct
  source 1..21: mol_type = other RNA; note = Description of Artificial Sequence: Synthetic oligonucleotide
gctataccctgagcttctctg

SEQ ID NO: 28154 - RNA, 21 nt, synthetic construct
  source 1..21: mol_type = other RNA; note = Description of Artificial Sequence: Synthetic oligonucleotide
agctataccctgagcttctct

SEQ ID NO: 28155 - RNA, 21 nt, synthetic construct
  source 1..21: mol_type = other RNA; note = Description of Artificial Sequence: Synthetic oligonucleotide
cagctataccctgagcttctc

SEQ ID NO: 28156 - RNA, 21 nt, synthetic construct
  source 1..21: mol_type = other RNA; note = Description of Artificial Sequence: Synthetic oligonucleotide
tcagctataccctgagcttct

SEQ ID NO: 28157 - RNA, 21 nt, synthetic construct
  source 1..21: mol_type = other RNA; note = Description of Artificial Sequence: Synthetic oligonucleotide
ttcagctataccctgagcttc

SEQ ID NO: 28158 - RNA, 21 nt, synthetic construct
  source 1..21: mol_type = other RNA; note = Description of Artificial Sequence: Synthetic oligonucleotide
attcagctataccctgagctt

SEQ ID NO: 28159 - RNA, 21 nt, synthetic construct
  source 1..21: mol_type = other RNA; note = Description of Artificial Sequence: Synthetic oligonucleotide
tattcagctataccctgagct

SEQ ID NO: 28160 - RNA, 21 nt, synthetic construct
  source 1..21: mol_type = other RNA; note = Description of Artificial Sequence: Synthetic oligonucleotide
ctattcagctataccctgagc

SEQ ID NO: 28161 - RNA, 21 nt, synthetic construct
  source 1..21: mol_type = other RNA; note = Description of Artificial Sequence: Synthetic oligonucleotide
cctattcagctataccctgag

SEQ ID NO: 28162 - RNA, 21 nt, synthetic construct
  source 1..21: mol_type = other RNA; note = Description of Artificial Sequence: Synthetic oligonucleotide
gcctattcagctataccctga

SEQ ID NO: 28163 - RNA, 21 nt, synthetic construct
  source 1..21: mol_type = other RNA; note = Description of Artificial Sequence: Synthetic oligonucleotide
tgcctattcagctataccctg

SEQ ID NO: 28164 - RNA, 21 nt, synthetic construct
  source 1..21: mol_type = other RNA; note = Description of Artificial Sequence: Synthetic oligonucleotide
ctgcctattcagctataccct

SEQ ID NO: 28165 - RNA, 21 nt, synthetic construct
  source 1..21: mol_type = other RNA; note = Description of Artificial Sequence: Synthetic oligonucleotide
actgcctattcagctataccc

SEQ ID NO: 28166 - RNA, 21 nt, synthetic construct
  source 1..21: mol_type = other RNA; note = Description of Artificial Sequence: Synthetic oligonucleotide
aactgcctattcagctatacc

SEQ ID NO: 28167 - RNA, 21 nt, synthetic construct
  source 1..21: mol_type = other RNA; note = Description of Artificial Sequence: Synthetic oligonucleotide
aaactgcctattcagctatac

SEQ ID NO: 28168 - RNA, 21 nt, synthetic construct
  source 1..21: mol_type = other RNA; note = Description of Artificial Sequence: Synthetic oligonucleotide
gaaactgcctattcagctata

SEQ ID NO: 28169 - RNA, 21 nt, synthetic construct
  source 1..21: mol_type = other RNA; note = Description of Artificial Sequence: Synthetic oligonucleotide
agaaactgcctattcagctat

SEQ ID NO: 28170 - RNA, 21 nt, synthetic construct
  source 1..21: mol_type = other RNA; note = Description of Artificial Sequence: Synthetic oligonucleotide
aagaaactgcctattcagcta

SEQ ID NO: 28171 - RNA, 21 nt, synthetic construct
  source 1..21: mol_type = other RNA; note = Description of Artificial Sequence: Synthetic oligonucleotide
aaagaaactgcctattcagct

SEQ ID NO: 28172 - RNA, 21 nt, synthetic construct
  source 1..21: mol_type = other RNA; note = Description of Artificial Sequence: Synthetic oligonucleotide
aaaagaaactgcctattcagc

SEQ ID NO: 28173 - RNA, 21 nt, synthetic construct
  source 1..21: mol_type = other RNA; note = Description of Artificial Sequence: Synthetic oligonucleotide
caaaagaaactgcctattcag

SEQ ID NO: 28174 - RNA, 21 nt, synthetic construct
  source 1..21: mol_type = other RNA; note = Description of Artificial Sequence: Synthetic oligonucleotide
acaaaagaaactgcctattca

SEQ ID NO: 28175 - RNA, 21 nt, synthetic construct
  source 1..21: mol_type = other RNA; note = Description of Artificial Sequence: Synthetic oligonucleotide
gacaaaagaaactgcctattc

SEQ ID NO: 28176 - RNA, 21 nt, synthetic construct
  source 1..21: mol_type = other RNA; note = Description of Artificial Sequence: Synthetic oligonucleotide
ggacaaaagaaactgcctatt

SEQ ID NO: 28177 - RNA, 21 nt, synthetic construct
  source 1..21: mol_type = other RNA; note = Description of Artificial Sequence: Synthetic oligonucleotide
aggacaaaagaaactgcctat

SEQ ID NO: 28178 - RNA, 21 nt, synthetic construct
  source 1..21: mol_type = other RNA; note = Description of Artificial Sequence: Synthetic oligonucleotide
caggacaaaagaaactgccta

SEQ ID NO: 28179 - RNA, 21 nt, synthetic construct
  source 1..21: mol_type = other RNA; note = Description of Artificial Sequence: Synthetic oligonucleotide
tcaggacaaaagaaactgcct

SEQ ID NO: 28180 - RNA, 21 nt, synthetic construct
  source 1..21: mol_type = other RNA; note = Description of Artificial Sequence: Synthetic oligonucleotide
ctcaggacaaaagaaactgcc

SEQ ID NO: 28181 - RNA, 21 nt, synthetic construct
  source 1..21: mol_type = other RNA; note = Description of Artificial Sequence: Synthetic oligonucleotide
cctcaggacaaaagaaactgc

SEQ ID NO: 28182 - RNA, 21 nt, synthetic construct
  source 1..21: mol_type = other RNA; note = Description of Artificial Sequence: Synthetic oligonucleotide
tcctcaggacaaaagaaactg

SEQ ID NO: 28183 - RNA, 21 nt, synthetic construct
  source 1..21: mol_type = other RNA; note = Description of Artificial Sequence: Synthetic oligonucleotide
ttcctcaggacaaaagaaact

SEQ ID NO: 28184 - RNA, 21 nt, synthetic construct
  source 1..21: mol_type = other RNA; note = Description of Artificial Sequence: Synthetic oligonucleotide
tttcctcaggacaaaagaaac

SEQ ID NO: 28185 - RNA, 21 nt, synthetic construct
  source 1..21: mol_type = other RNA; note = Description of Artificial Sequence: Synthetic oligonucleotide
ttttcctcaggacaaaagaaa

SEQ ID NO: 28186 - RNA, 21 nt, synthetic construct
  source 1..21: mol_type = other RNA; note = Description of Artificial Sequence: Synthetic oligonucleotide
attttcctcaggacaaaagaa

SEQ ID NO: 28187 - RNA, 21 nt, synthetic construct
  source 1..21: mol_type = other RNA; note = Description of Artificial Sequence: Synthetic oligonucleotide
gattttcctcaggacaaaaga

SEQ ID NO: 28188 - RNA, 21 nt, synthetic construct
  source 1..21: mol_type = other RNA; note = Description of Artificial Sequence: Synthetic oligonucleotide
tgattttcctcaggacaaaag

SEQ ID NO: 28189 - RNA, 21 nt, synthetic construct
  source 1..21: mol_type = other RNA; note = Description of Artificial Sequence: Synthetic oligonucleotide
ctgattttcctcaggacaaaa

SEQ ID NO: 28190 - RNA, 21 nt, synthetic construct
  source 1..21: mol_type = other RNA; note = Description of Artificial Sequence: Synthetic oligonucleotide
cctgattttcctcaggacaaa

SEQ ID NO: 28191 - RNA, 21 nt, synthetic construct
  source 1..21: mol_type = other RNA; note = Description of Artificial Sequence: Synthetic oligonucleotide
tcctgattttcctcaggacaa

SEQ ID NO: 28192 - RNA, 21 nt, synthetic construct
  source 1..21: mol_type = other RNA; note = Description of Artificial Sequence: Synthetic oligonucleotide
gtcctgattttcctcaggaca

SEQ ID NO: 28193 - RNA, 21 nt, synthetic construct
  source 1..21: mol_type = other RNA; note = Description of Artificial Sequence: Synthetic oligonucleotide
tgtcctgattttcctcaggac

SEQ ID NO: 28194 - RNA, 21 nt, synthetic construct
  source 1..21: mol_type = other RNA; note = Description of Artificial Sequence: Synthetic oligonucleotide
atgtcctgattttcctcagga

SEQ ID NO: 28195 - RNA, 21 nt, synthetic construct
  source 1..21: mol_type = other RNA; note = Description of Artificial Sequence: Synthetic oligonucleotide
catgtcctgattttcctcagg

SEQ ID NO: 28196 - RNA, 21 nt, synthetic construct
  source 1..21: mol_type = other RNA; note = Description of Artificial Sequence: Synthetic oligonucleotide
gcatgtcctgattttcctcag

SEQ ID NO: 28197 - RNA, 21 nt, synthetic construct
  source 1..21: mol_type = other RNA; note = Description of Artificial Sequence: Synthetic oligonucleotide
ggcatgtcctgattttcctca

SEQ ID NO: 28198 - RNA, 21 nt, synthetic construct
  source 1..21: mol_type = other RNA; note = Description of Artificial Sequence: Synthetic oligonucleotide
aggcatgtcctgattttcctc

SEQ ID NO: 28199 - RNA, 21 nt, synthetic construct
  source 1..21: mol_type = other RNA; note = Description of Artificial Sequence: Synthetic oligonucleotide
caggcatgtcctgattttcct

SEQ ID NO: 28200 - RNA, 21 nt, synthetic construct
  source 1..21: mol_type = other RNA; note = Description of Artificial Sequence: Synthetic oligonucleotide
gcaggcatgtcctgattttcc

SEQ ID NO: 28201 - RNA, 21 nt, synthetic construct
  source 1..21: mol_type = other RNA; note = Description of Artificial Sequence: Synthetic oligonucleotide
agcaggcatgtcctgattttc

SEQ ID NO: 28202 - RNA, 21 nt, synthetic construct
  source 1..21: mol_type = other RNA; note = Description of Artificial Sequence: Synthetic oligonucleotide
aagcaggcatgtcctgatttt

SEQ ID NO: 28203 - RNA, 21 nt, synthetic construct
  source 1..21: mol_type = other RNA; note = Description of Artificial Sequence: Synthetic oligonucleotide
aaagcaggcatgtcctgattt

SEQ ID NO: 28204 - RNA, 21 nt, synthetic construct
  source 1..21: mol_type = other RNA; note = Description of Artificial Sequence: Synthetic oligonucleotide
gaaagcaggcatgtcctgatt

SEQ ID NO: 28205 - RNA, 21 nt, synthetic construct
  source 1..21: mol_type = other RNA; note = Description of Artificial Sequence: Synthetic oligonucleotide
agaaagcaggcatgtcctgat

SEQ ID NO: 28206 - RNA, 21 nt, synthetic construct
  source 1..21: mol_type = other RNA; note = Description of Artificial Sequence: Synthetic oligonucleotide
tagaaagcaggcatgtcctga

SEQ ID NO: 28207 - RNA, 21 nt, synthetic construct
  source 1..21: mol_type = other RNA; note = Description of Artificial Sequence: Synthetic oligonucleotide
ttagaaagcaggcatgtcctg

SEQ ID NO: 28208 - RNA, 21 nt, synthetic construct
  source 1..21: mol_type = other RNA; note = Description of Artificial Sequence: Synthetic oligonucleotide
tttagaaagcaggcatgtcct

SEQ ID NO: 28209 - RNA, 21 nt, synthetic construct
  source 1..21: mol_type = other RNA; note = Description of Artificial Sequence: Synthetic oligonucleotide
ttttagaaagcaggcatgtcc

SEQ ID NO: 28210 - RNA, 21 nt, synthetic construct
  source 1..21: mol_type = other RNA; note = Description of Artificial Sequence: Synthetic oligonucleotide
tttttagaaagcaggcatgtc

SEQ ID NO: 28211 - RNA, 21 nt, synthetic construct
  source 1..21: mol_type = other RNA; note = Description of Artificial Sequence: Synthetic oligonucleotide
atttttagaaagcaggcatgt

SEQ ID NO: 28212 - RNA, 21 nt, synthetic construct
  source 1..21: mol_type = other RNA; note = Description of Artificial Sequence: Synthetic oligonucleotide
gatttttagaaagcaggcatg

SEQ ID NO: 28213 - RNA, 21 nt, synthetic construct
  source 1..21: mol_type = other RNA; note = Description of Artificial Sequence: Synthetic oligonucleotide
agatttttagaaagcaggcat

SEQ ID NO: 28214 - RNA, 21 nt, synthetic construct
  source 1..21: mol_type = other RNA; note = Description of Artificial Sequence: Synthetic oligonucleotide
aagatttttagaaagcaggca

SEQ ID NO: 28215 - RNA, 21 nt, synthetic construct
  source 1..21: mol_type = other RNA; note = Description of Artificial Sequence: Synthetic oligonucleotide
gaagatttttagaaagcaggc

SEQ ID NO: 28216 - RNA, 21 nt, synthetic construct
  source 1..21: mol_type = other RNA; note = Description of Artificial Sequence: Synthetic oligonucleotide
ggaagatttttagaaagcagg

SEQ ID NO: 28217 - RNA, 21 nt, synthetic construct
  source 1..21: mol_type = other RNA; note = Description of Artificial Sequence: Synthetic oligonucleotide
aggaagatttttagaaagcag

SEQ ID NO: 28218 - RNA, 21 nt, synthetic construct
  source 1..21: mol_type = other RNA; note = Description of Artificial Sequence: Synthetic oligonucleotide
gaggaagatttttagaaagca

SEQ ID NO: 28219 - RNA, 21 nt, synthetic construct
  source 1..21: mol_type = other RNA; note = Description of Artificial Sequence: Synthetic oligonucleotide
agaggaagatttttagaaagc

SEQ ID NO: 28220 - RNA, 21 nt, synthetic construct
  source 1..21: mol_type = other RNA; note = Description of Artificial Sequence: Synthetic oligonucleotide
cagaggaagatttttagaaag

SEQ ID NO: 28221 - RNA, 21 nt, synthetic construct
  source 1..21: mol_type = other RNA; note = Description of Artificial Sequence: Synthetic oligonucleotide
tcagaggaagatttttagaaa

SEQ ID NO: 28222 - RNA, 21 nt, synthetic construct
  source 1..21: mol_type = other RNA; note = Description of Artificial Sequence: Synthetic oligonucleotide
ttcagaggaagatttttagaa

SEQ ID NO: 28223 - RNA, 21 nt, synthetic construct
  source 1..21: mol_type = other RNA; note = Description of Artificial Sequence: Synthetic oligonucleotide
cttcagaggaagatttttaga

SEQ ID NO: 28224 - RNA, 21 nt, synthetic construct
  source 1..21: mol_type = other RNA; note = Description of Artificial Sequence: Synthetic oligonucleotide
tcttcagaggaagatttttag

SEQ ID NO: 28225 - RNA, 21 nt, synthetic construct
  source 1..21: mol_type = other RNA; note = Description of Artificial Sequence: Synthetic oligonucleotide
gtcttcagaggaagattttta

SEQ ID NO: 28226 - RNA, 21 nt, synthetic construct
  source 1..21: mol_type = other RNA; note = Description of Artificial Sequence: Synthetic oligonucleotide
ggtcttcagaggaagattttt

SEQ ID NO: 28227 - RNA, 21 nt, synthetic construct
  source 1..21: mol_type = other RNA; note = Description of Artificial Sequence: Synthetic oligonucleotide
aggtcttcagaggaagatttt

SEQ ID NO: 28228 - RNA, 21 nt, synthetic construct
  source 1..21: mol_type = other RNA; note = Description of Artificial Sequence: Synthetic oligonucleotide
caggtcttcagaggaagattt

SEQ ID NO: 28229 - RNA, 21 nt, synthetic construct
  source 1..21: mol_type = other RNA; note = Description of Artificial Sequence: Synthetic oligonucleotide
tcaggtcttcagaggaagatt

SEQ ID NO: 28230 - RNA, 21 nt, synthetic construct
  source 1..21: mol_type = other RNA; note = Description of Artificial Sequence: Synthetic oligonucleotide
gtcaggtcttcagaggaagat

SEQ ID NO: 28231 - RNA, 21 nt, synthetic construct
  source 1..21: mol_type = other RNA; note = Description of Artificial Sequence: Synthetic oligonucleotide
ggtcaggtcttcagaggaaga

SEQ ID NO: 28232 - RNA, 21 nt, synthetic construct
  source 1..21: mol_type = other RNA; note = Description of Artificial Sequence: Synthetic oligonucleotide
gggtcaggtcttcagaggaag

SEQ ID NO: 28233 - RNA, 21 nt, synthetic construct
  source 1..21: mol_type = other RNA; note = Description of Artificial Sequence: Synthetic oligonucleotide
tgggtcaggtcttcagaggaa

SEQ ID NO: 28234 - RNA, 21 nt, synthetic construct
  source 1..21: mol_type = other RNA; note = Description of Artificial Sequence: Synthetic oligonucleotide
ttgggtcaggtcttcagagga

SEQ ID NO: 28235 - RNA, 21 nt, synthetic construct
  source 1..21: mol_type = other RNA; note = Description of Artificial Sequence: Synthetic oligonucleotide
cttgggtcaggtcttcagagg

SEQ ID NO: 28236 - RNA, 21 nt, synthetic construct
  source 1..21: mol_type = other RNA; note = Description of Artificial Sequence: Synthetic oligonucleotide
gcttgggtcaggtcttcagag

SEQ ID NO: 28237 - RNA, 21 nt, synthetic construct
  source 1..21: mol_type = other RNA; note = Description of Artificial Sequence: Synthetic oligonucleotide
agcttgggtcaggtcttcaga

SEQ ID NO: 28238 - RNA, 21 nt, synthetic construct
  source 1..21: mol_type = other RNA; note = Description of Artificial Sequence: Synthetic oligonucleotide
gagcttgggtcaggtcttcag

SEQ ID NO: 28239 - RNA, 21 nt, synthetic construct
  source 1..21: mol_type = other RNA; note = Description of Artificial Sequence: Synthetic oligonucleotide
agagcttgggtcaggtcttca

SEQ ID NO: 28240 - RNA, 21 nt, synthetic construct
  source 1..21: mol_type = other RNA; note = Description of Artificial Sequence: Synthetic oligonucleotide
aagagcttgggtcaggtcttc

SEQ ID NO: 28241 - RNA, 21 nt, synthetic construct
  source 1..21: mol_type = other RNA; note = Description of Artificial Sequence: Synthetic oligonucleotide
taagagcttgggtcaggtctt

SEQ ID NO: 28242 - RNA, 21 nt, synthetic construct
  source 1..21: mol_type = other RNA; note = Description of Artificial Sequence: Synthetic oligonucleotide
ttaagagcttgggtcaggtct

SEQ ID NO: 28243 - RNA, 21 nt, synthetic construct
  source 1..21: mol_type = other RNA; note = Description of Artificial Sequence: Synthetic oligonucleotide
tttaagagcttgggtcaggtc

SEQ ID NO: 28244 - RNA, 21 nt, synthetic construct
  source 1..21: mol_type = other RNA; note = Description of Artificial Sequence: Synthetic oligonucleotide
atttaagagcttgggtcaggt

SEQ ID NO: 28245 - RNA, 21 nt, synthetic construct
  source 1..21: mol_type = other RNA; note = Description of Artificial Sequence: Synthetic oligonucleotide
catttaagagcttgggtcagg

SEQ ID NO: 28246 - RNA, 21 nt, synthetic construct
  source 1..21: mol_type = other RNA; note = Description of Artificial Sequence: Synthetic oligonucleotide
gcatttaagagcttgggtcag

SEQ ID NO: 28247 - RNA, 21 nt, synthetic construct
  source 1..21: mol_type = other RNA; note = Description of Artificial Sequence: Synthetic oligonucleotide
agcatttaagagcttgggtca

SEQ ID NO: 28248 - RNA, 21 nt, synthetic construct
  source 1..21: mol_type = other RNA; note = Description of Artificial Sequence: Synthetic oligonucleotide
tagcatttaagagcttgggtc

SEQ ID NO: 28249 - RNA, 21 nt, synthetic construct
  source 1..21: mol_type = other RNA; note = Description of Artificial Sequence: Synthetic oligonucleotide
atagcatttaagagcttgggt

SEQ ID NO: 28250 - RNA, 21 nt, synthetic construct
  source 1..21: mol_type = other RNA; note = Description of Artificial Sequence: Synthetic oligonucleotide
aatagcatttaagagcttggg

SEQ ID NO: 28251 - RNA, 21 nt, synthetic construct
  source 1..21: mol_type = other RNA; note = Description of Artificial Sequence: Synthetic oligonucleotide
caatagcatttaagagcttgg

SEQ ID NO: 28252 - RNA, 21 nt, synthetic construct
  source 1..21: mol_type = other RNA; note = Description of Artificial Sequence: Synthetic oligonucleotide
acaatagcatttaagagcttg

SEQ ID NO: 28253 - RNA, 21 nt, synthetic construct
  source 1..21: mol_type = other RNA; note = Description of Artificial Sequence: Synthetic oligonucleotide
tacaatagcatttaagagctt

SEQ ID NO: 28254 - RNA, 21 nt, synthetic construct
  source 1..21: mol_type = other RNA; note = Description of Artificial Sequence: Synthetic oligonucleotide
ttacaatagcatttaagagct

SEQ ID NO: 28255 - RNA, 21 nt, synthetic construct
  source 1..21: mol_type = other RNA; note = Description of Artificial Sequence: Synthetic oligonucleotide
cttacaatagcatttaagagc

SEQ ID NO: 28256 - RNA, 21 nt, synthetic construct
  source 1..21: mol_type = other RNA; note = Description of Artificial Sequence: Synthetic oligonucleotide
tcttacaatagcatttaagag

SEQ ID NO: 28257 - RNA, 21 nt, synthetic construct
  source 1..21: mol_type = other RNA; note = Description of Artificial Sequence: Synthetic oligonucleotide
ctcttacaatagcatttaaga

SEQ ID NO: 28258 - RNA, 21 nt, synthetic construct
  source 1..21: mol_type = other RNA; note = Description of Artificial Sequence: Synthetic oligonucleotide
tctcttacaatagcatttaag

SEQ ID NO: 28259 - RNA, 21 nt, synthetic construct
  source 1..21: mol_type = other RNA; note = Description of Artificial Sequence: Synthetic oligonucleotide
ttctcttacaatagcatttaa

SEQ ID NO: 28260 - RNA, 21 nt, synthetic construct
  source 1..21: mol_type = other RNA; note = Description of Artificial Sequence: Synthetic oligonucleotide
tttctcttacaatagcattta

SEQ ID NO: 28261 - RNA, 21 nt, synthetic construct
  source 1..21: mol_type = other RNA; note = Description of Artificial Sequence: Synthetic oligonucleotide
atttctcttacaatagcattt

SEQ ID NO: 28262 - RNA, 21 nt, synthetic construct
  source 1..21: mol_type = other RNA; note = Description of Artificial Sequence: Synthetic oligonucleotide
aatttctcttacaatagcatt

SEQ ID NO: 28263 - RNA, 21 nt, synthetic construct
  source 1..21: mol_type = other RNA; note = Description of Artificial Sequence: Synthetic oligonucleotide
aaatttctcttacaatagcat

SEQ ID NO: 28264 - RNA, 21 nt, synthetic construct
  source 1..21: mol_type = other RNA; note = Description of Artificial Sequence: Synthetic oligonucleotide
gaaatttctcttacaatagca

SEQ ID NO: 28265 - RNA, 21 nt, synthetic construct
  source 1..21: mol_type = other RNA; note = Description of Artificial Sequence: Synthetic oligonucleotide
agaaatttctcttacaatagc

SEQ ID NO: 28266 - RNA, 21 nt, synthetic construct
  source 1..21: mol_type = other RNA; note = Description of Artificial Sequence: Synthetic oligonucleotide
aagaaatttctcttacaatag

SEQ ID NO: 28267 - RNA, 21 nt, synthetic construct
  source 1..21: mol_type = other RNA; note = Description of Artificial Sequence: Synthetic oligonucleotide
aaagaaatttctcttacaata

SEQ ID NO: 28268 - RNA, 21 nt, synthetic construct
  source 1..21: mol_type = other RNA; note = Description of Artificial Sequence: Synthetic oligonucleotide
caaagaaatttctcttacaat

SEQ ID NO: 28269 - RNA, 21 nt, synthetic construct
  source 1..21: mol_type = other RNA; note = Description of Artificial Sequence: Synthetic oligonucleotide
acaaagaaatttctcttacaa

SEQ ID NO: 28270 - RNA, 21 nt, synthetic construct
  source 1..21: mol_type = other RNA; note = Description of Artificial Sequence: Synthetic oligonucleotide
gacaaagaaatttctcttaca

SEQ ID NO: 28271 - RNA, 21 nt, synthetic construct
  source 1..21: mol_type = other RNA; note = Description of Artificial Sequence: Synthetic oligonucleotide
agacaaagaaatttctcttac

SEQ ID NO: 28272 - RNA, 21 nt, synthetic construct
  source 1..21: mol_type = other RNA; note = Description of Artificial Sequence: Synthetic oligonucleotide
tagacaaagaaatttctctta

SEQ ID NO: 28273 - RNA, 21 nt, synthetic construct
  source 1..21: mol_type = other RNA; note = Description of Artificial Sequence: Synthetic oligonucleotide
atagacaaagaaatttctctt

SEQ ID NO: 28274 - RNA, 21 nt, synthetic construct
  source 1..21: mol_type = other RNA; note = Description of Artificial Sequence: Synthetic oligonucleotide
aatagacaaagaaatttctct

SEQ ID NO: 28275 - RNA, 21 nt, synthetic construct
  source 1..21: mol_type = other RNA; note = Description of Artificial Sequence: Synthetic oligonucleotide
taatagacaaagaaatttctc

SEQ ID NO: 28276 - RNA, 21 nt, synthetic construct
  source 1..21: mol_type = other RNA; note = Description of Artificial Sequence: Synthetic oligonucleotide
ttaatagacaaagaaatttct

SEQ ID NO: 28277 - RNA, 21 nt, synthetic construct
  source 1..21: mol_type = other RNA; note = Description of Artificial Sequence: Synthetic oligonucleotide
gttaatagacaaagaaatttc

SEQ ID NO: 28278 - RNA, 21 nt, synthetic construct
  source 1..21: mol_type = other RNA; note = Description of Artificial Sequence: Synthetic oligonucleotide
agttaatagacaaagaaattt

SEQ ID NO: 28279 - RNA, 21 nt, synthetic construct
  source 1..21: mol_type = other RNA; note = Description of Artificial Sequence: Synthetic oligonucleotide
gagttaatagacaaagaaatt

SEQ ID NO: 28280 - RNA, 21 nt, synthetic construct
  source 1..21: mol_type = other RNA; note = Description of Artificial Sequence: Synthetic oligonucleotide
ggagttaatagacaaagaaat

SEQ ID NO: 28281 - RNA, 21 nt, synthetic construct
  source 1..21: mol_type = other RNA; note = Description of Artificial Sequence: Synthetic oligonucleotide
tggagttaatagacaaagaaa

SEQ ID NO: 28282 - RNA, 21 nt, synthetic construct
  source 1..21: mol_type = other RNA; note = Description of Artificial Sequence: Synthetic oligonucleotide
atggagttaatagacaaagaa

SEQ ID NO: 28283 - RNA, 21 nt, synthetic construct
  source 1..21: mol_type = other RNA; note = Description of Artificial Sequence: Synthetic oligonucleotide
aatggagttaatagacaaaga

SEQ ID NO: 28284 - RNA, 21 nt, synthetic construct
  source 1..21: mol_type = other RNA; note = Description of Artificial Sequence: Synthetic oligonucleotide
aaatggagttaatagacaaag

SEQ ID NO: 28285 - RNA, 21 nt, synthetic construct
  source 1..21: mol_type = other RNA; note = Description of Artificial Sequence: Synthetic oligonucleotide
aaaatggagttaatagacaaa

SEQ ID NO: 28286 - RNA, 21 nt, synthetic construct
  source 1..21: mol_type = other RNA; note = Description of Artificial Sequence: Synthetic oligonucleotide
taaaatggagttaatagacaa

SEQ ID NO: 28287 - RNA, 21 nt, synthetic construct
  source 1..21: mol_type = other RNA; note = Description of Artificial Sequence: Synthetic oligonucleotide
ctaaaatggagttaatagaca

SEQ ID NO: 28288 - RNA, 21 nt, synthetic construct
  source 1..21: mol_type = other RNA; note = Description of Artificial Sequence: Synthetic oligonucleotide
actaaaatggagttaatagac

SEQ ID NO: 28289 - RNA, 21 nt, synthetic construct
  source 1..21: mol_type = other RNA; note = Description of Artificial Sequence: Synthetic oligonucleotide
tactaaaatggagttaataga

SEQ ID NO: 28290 - RNA, 21 nt, synthetic construct
  source 1..21: mol_type = other RNA; note = Description of Artificial Sequence: Synthetic oligonucleotide
ctactaaaatggagttaatag

SEQ ID NO: 28291 - RNA, 21 nt, synthetic construct
  source 1..21: mol_type = other RNA; note = Description of Artificial Sequence: Synthetic oligonucleotide
cctactaaaatggagttaata

SEQ ID NO: 28292 - RNA, 21 nt, synthetic construct
  source 1..21: mol_type = other RNA; note = Description of Artificial Sequence: Synthetic oligonucleotide
ccctactaaaatggagttaat

SEQ ID NO: 28293 - RNA, 21 nt, synthetic construct
  source 1..21: mol_type = other RNA; note = Description of Artificial Sequence: Synthetic oligonucleotide
tccctactaaaatggagttaa

SEQ ID NO: 28294 - RNA, 21 nt, synthetic construct
  source 1..21: mol_type = other RNA; note = Description of Artificial Sequence: Synthetic oligonucleotide
atccctactaaaatggagtta

SEQ ID NO: 28295 - RNA, 21 nt, synthetic construct
  source 1..21: mol_type = other RNA; note = Description of Artificial Sequence: Synthetic oligonucleotide
aatccctactaaaatggagtt

SEQ ID NO: 28296 - RNA, 21 nt, synthetic construct
  source 1..21: mol_type = other RNA; note = Description of Artificial Sequence: Synthetic oligonucleotide
gaatccctactaaaatggagt

SEQ ID NO: 28297 - RNA, 21 nt, synthetic construct
  source 1..21: mol_type = other RNA; note = Description of Artificial Sequence: Synthetic oligonucleotide
tgaatccctactaaaatggag

SEQ ID NO: 28298 - RNA, 21 nt, synthetic construct
  source 1..21: mol_type = other RNA; note = Description of Artificial Sequence: Synthetic oligonucleotide
gtgaatccctactaaaatgga

SEQ ID NO: 28299 - RNA, 21 nt, synthetic construct
  source 1..21: mol_type = other RNA; note = Description of Artificial Sequence: Synthetic oligonucleotide
agtgaatccctactaaaatgg

SEQ ID NO: 28300 - RNA, 21 nt, synthetic construct
  source 1..21: mol_type = other RNA; note = Description of Artificial Sequence: Synthetic oligonucleotide
cagtgaatccctactaaaatg

SEQ ID NO: 28301 - RNA, 21 nt, synthetic construct
  source 1..21: mol_type = other RNA; note = Description of Artificial Sequence: Synthetic oligonucleotide
tcagtgaatccctactaaaat

SEQ ID NO: 28302 - RNA, 21 nt, synthetic construct
  source 1..21: mol_type = other RNA; note = Description of Artificial Sequence: Synthetic oligonucleotide
gtcagtgaatccctactaaaa

SEQ ID NO: 28303 - RNA, 21 nt, synthetic construct
  source 1..21: mol_type = other RNA; note = Description of Artificial Sequence: Synthetic oligonucleotide
agtcagtgaatccctactaaa

SEQ ID NO: 28304 - RNA, 21 nt, synthetic construct
  source 1..21: mol_type = other RNA; note = Description of Artificial Sequence: Synthetic oligonucleotide
tagtcagtgaatccctactaa

SEQ ID NO: 28305 - RNA, 21 nt, synthetic construct
  source 1..21: mol_type = other RNA; note = Description of Artificial Sequence: Synthetic oligonucleotide
ctagtcagtgaatccctacta

SEQ ID NO: 28306 - RNA, 21 nt, synthetic construct
  source 1..21: mol_type = other RNA; note = Description of Artificial Sequence: Synthetic oligonucleotide
tctagtcagtgaatccctact

SEQ ID NO: 28307 - RNA, 21 nt, synthetic construct
  source 1..21: mol_type = other RNA; note = Description of Artificial Sequence: Synthetic oligonucleotide
atctagtcagtgaatccctac

SEQ ID NO: 28308 - RNA, 21 nt, synthetic construct
  source 1..21: mol_type = other RNA; note = Description of Artificial Sequence: Synthetic oligonucleotide
aatctagtcagtgaatcccta

SEQ ID NO: 28309 - RNA, 21 nt, synthetic construct
  source 1..21: mol_type = other RNA; note = Description of Artificial Sequence: Synthetic oligonucleotide
aaatctagtcagtgaatccct

SEQ ID NO: 28310 - RNA, 21 nt, synthetic construct
  source 1..21: mol_type = other RNA; note = Description of Artificial Sequence: Synthetic oligonucleotide
aaaatctagtcagtgaatccc

SEQ ID NO: 28311 - RNA, 21 nt, synthetic construct
  source 1..21: mol_type = other RNA; note = Description of Artificial Sequence: Synthetic oligonucleotide
taaaatctagtcagtgaatcc

SEQ ID NO: 28312 - RNA, 21 nt, synthetic construct
  source 1..21: mol_type = other RNA; note = Description of Artificial Sequence: Synthetic oligonucleotide
gtaaaatctagtcagtgaatc

SEQ ID NO: 28313 - RNA, 21 nt, synthetic construct
  source 1..21: mol_type = other RNA; note = Description of Artificial Sequence: Synthetic oligonucleotide
agtaaaatctagtcagtgaat

SEQ ID NO: 28314 - RNA, 21 nt, synthetic construct
  source 1..21: mol_type = other RNA; note = Description of Artificial Sequence: Synthetic oligonucleotide
cagtaaaatctagtcagtgaa

SEQ ID NO: 28315 - RNA, 21 nt, synthetic construct
  source 1..21: mol_type = other RNA; note = Description of Artificial Sequence: Synthetic oligonucleotide
tcagtaaaatctagtcagtga

SEQ ID NO: 28316 - RNA, 21 nt, synthetic construct
  source 1..21: mol_type = other RNA; note = Description of Artificial Sequence: Synthetic oligonucleotide
ttcagtaaaatctagtcagtg

SEQ ID NO: 28317 - RNA, 21 nt, synthetic construct
  source 1..21: mol_type = other RNA; note = Description of Artificial Sequence: Synthetic oligonucleotide
gttcagtaaaatctagtcagt

SEQ ID NO: 28318 - RNA, 21 nt, synthetic construct
  source 1..21: mol_type = other RNA; note = Description of Artificial Sequence: Synthetic oligonucleotide
agttcagtaaaatctagtcag

SEQ ID NO: 28319 - RNA, 21 nt, synthetic construct
  source 1..21: mol_type = other RNA; note = Description of Artificial Sequence: Synthetic oligonucleotide
tagttcagtaaaatctagtca

SEQ ID NO: 28320 - RNA, 21 nt, synthetic construct
  source 1..21: mol_type = other RNA; note = Description of Artificial Sequence: Synthetic oligonucleotide
atagttcagtaaaatctagtc

SEQ ID NO: 28321 - RNA, 21 nt, synthetic construct
  source 1..21: mol_type = other RNA; note = Description of Artificial Sequence: Synthetic oligonucleotide
catagttcagtaaaatctagt

SEQ ID NO: 28322 - RNA, 21 nt, synthetic construct
  source 1..21: mol_type = other RNA; note = Description of Artificial Sequence: Synthetic oligonucleotide
tcatagttcagtaaaatctag

SEQ ID NO: 28323 - RNA, 21 nt, synthetic construct
  source 1..21: mol_type = other RNA; note = Description of Artificial Sequence: Synthetic oligonucleotide
ttcatagttcagtaaaatcta

SEQ ID NO: 28324 - RNA, 21 nt, synthetic construct
  source 1..21: mol_type = other RNA; note = Description of Artificial Sequence: Synthetic oligonucleotide
tttcatagttcagtaaaatct

SEQ ID NO: 28325 - RNA, 21 nt, synthetic construct
  source 1..21: mol_type = other RNA; note = Description of Artificial Sequence: Synthetic oligonucleotide
ttttcatagttcagtaaaatc

SEQ ID NO: 28326 - RNA, 21 nt, synthetic construct
  source 1..21: mol_type = other RNA; note = Description of Artificial Sequence: Synthetic oligonucleotide
attttcatagttcagtaaaat

SEQ ID NO: 28327 - RNA, 21 nt, synthetic construct
  source 1..21: mol_type = other RNA; note = Description of Artificial Sequence: Synthetic oligonucleotide
tattttcatagttcagtaaaa

SEQ ID NO: 28328 - RNA, 21 nt, synthetic construct
  source 1..21: mol_type = other RNA; note = Description of Artificial Sequence: Synthetic oligonucleotide
ttattttcatagttcagtaaa

SEQ ID NO: 28329 - RNA, 21 nt, synthetic construct
  source 1..21: mol_type = other RNA; note = Description of Artificial Sequence: Synthetic oligonucleotide
tttattttcatagttcagtaa

SEQ ID NO: 28330 - RNA, 21 nt, synthetic construct
  source 1..21: mol_type = other RNA; note = Description of Artificial Sequence: Synthetic oligonucleotide
atttattttcatagttcagta

SEQ ID NO: 28331 - RNA, 21 nt, synthetic construct
  source 1..21: mol_type = other RNA; note = Description of Artificial Sequence: Synthetic oligonucleotide
tatttattttcatagttcagt

SEQ ID NO: 28332 - RNA, 21 nt, synthetic construct
  source 1..21: mol_type = other RNA; note = Description of Artificial Sequence: Synthetic oligonucleotide
gtatttattttcatagttcag

SEQ ID NO: 28333 - RNA, 21 nt, synthetic construct
  source 1..21: mol_type = other RNA; note = Description of Artificial Sequence: Synthetic oligonucleotide
tgtatttattttcatagttca

SEQ ID NO: 28334 - RNA, 21 nt, synthetic construct
  source 1..21: mol_type = other RNA; note = Description of Artificial Sequence: Synthetic oligonucleotide
gtgtatttattttcatagttc

SEQ ID NO: 28335 - RNA, 21 nt, synthetic construct
  source 1..21: mol_type = other RNA; note = Description of Artificial Sequence: Synthetic oligonucleotide
tgtgtatttattttcatagtt

SEQ ID NO: 28336 - RNA, 21 nt, synthetic construct
  source 1..21: mol_type = other RNA; note = Description of Artificial Sequence: Synthetic oligonucleotide
atgtgtatttattttcatagt

SEQ ID NO: 28337 - RNA, 21 nt, synthetic construct
  source 1..21: mol_type = other RNA; note = Description of Artificial Sequence: Synthetic oligonucleotide
tatgtgtatttattttcatag

SEQ ID NO: 28338 - RNA, 21 nt, synthetic construct
  source 1..21: mol_type = other RNA; note = Description of Artificial Sequence: Synthetic oligonucleotide
ttatgtgtatttattttcata

SEQ ID NO: 28339 - RNA, 21 nt, synthetic construct
  source 1..21: mol_type = other RNA; note = Description of Artificial Sequence: Synthetic oligonucleotide
attatgtgtatttattttcat

SEQ ID NO: 28340 - RNA, 21 nt, synthetic construct
  source 1..21: mol_type = other RNA; note = Description of Artificial Sequence: Synthetic oligonucleotide
aattatgtgtatttattttca

SEQ ID NO: 28341 - RNA, 21 nt, synthetic construct
  source 1..21: mol_type = other RNA; note = Description of Artificial Sequence: Synthetic oligonucleotide
aaattatgtgtatttattttc

SEQ ID NO: 28342 - RNA, 21 nt, synthetic construct
  source 1..21: mol_type = other RNA; note = Description of Artificial Sequence: Synthetic oligonucleotide
aaaattatgtgtatttatttt

SEQ ID NO: 28343 - RNA, 21 nt, synthetic construct
  source 1..21: mol_type = other RNA; note = Description of Artificial Sequence: Synthetic oligonucleotide
aaaaattatgtgtatttattt

SEQ ID NO: 28344 - RNA, 21 nt, synthetic construct
  source 1..21: mol_type = other RNA; note = Description of Artificial Sequence: Synthetic oligonucleotide
gaaaaattatgtgtatttatt

SEQ ID NO: 28345 - RNA, 21 nt, synthetic construct
  source 1..21: mol_type = other RNA; note = Description of Artificial Sequence: Synthetic oligonucleotide
tgaaaaattatgtgtatttat

SEQ ID NO: 28346 - RNA, 21 nt, synthetic construct
  source 1..21: mol_type = other RNA; note = Description of Artificial Sequence: Synthetic oligonucleotide
gtgaaaaattatgtgtattta

SEQ ID NO: 28347 - RNA, 21 nt, synthetic construct
  source 1..21: mol_type = other RNA; note = Description of Artificial Sequence: Synthetic oligonucleotide
tgtgaaaaattatgtgtattt

SEQ ID NO: 28348 - RNA, 21 nt, synthetic construct
  source 1..21: mol_type = other RNA; note = Description of Artificial Sequence: Synthetic oligonucleotide
ttgtgaaaaattatgtgtatt

SEQ ID NO: 28349 - RNA, 21 nt, synthetic construct
  source 1..21: mol_type = other RNA; note = Description of Artificial Sequence: Synthetic oligonucleotide
tttgtgaaaaattatgtgtat

SEQ ID NO: 28350 - RNA, 21 nt, synthetic construct
  source 1..21: mol_type = other RNA; note = Description of Artificial Sequence: Synthetic oligonucleotide
ttttgtgaaaaattatgtgta

SEQ ID NO: 28351 - RNA, 21 nt, synthetic construct
  source 1..21: mol_type = other RNA; note = Description of Artificial Sequence: Synthetic oligonucleotide
attttgtgaaaaattatgtgt

SEQ ID NO: 28352 - RNA, 21 nt, synthetic construct
  source 1..21: mol_type = other RNA; note = Description of Artificial Sequence: Synthetic oligonucleotide
aattttgtgaaaaattatgtg

SEQ ID NO: 28353 - RNA, 21 nt, synthetic construct
  source 1..21: mol_type = other RNA; note = Description of Artificial Sequence: Synthetic oligonucleotide
aaattttgtgaaaaattatgt

SEQ ID NO: 28354 - RNA, 21 nt, synthetic construct
  source 1..21: mol_type = other RNA; note = Description of Artificial Sequence: Synthetic oligonucleotide
aaaattttgtgaaaaattatg

SEQ ID NO: 28355 - RNA, 21 nt, synthetic construct
  source 1..21: mol_type = other RNA; note = Description of Artificial Sequence: Synthetic oligonucleotide
caaaattttgtgaaaaattat

SEQ ID NO: 28356 - RNA, 21 nt, synthetic construct
  source 1..21: mol_type = other RNA; note = Description of Artificial Sequence: Synthetic oligonucleotide
ccaaaattttgtgaaaaatta

SEQ ID NO: 28357 - RNA, 21 nt, synthetic construct
  source 1..21: mol_type = other RNA; note = Description of Artificial Sequence: Synthetic oligonucleotide
cccaaaattttgtgaaaaatt

SEQ ID NO: 28358 - RNA, 21 nt, synthetic construct
  source 1..21: mol_type = other RNA; note = Description of Artificial Sequence: Synthetic oligonucleotide
gcccaaaattttgtgaaaaat

SEQ ID NO: 28359 - RNA, 21 nt, synthetic construct
  source 1..21: mol_type = other RNA; note = Description of Artificial Sequence: Synthetic oligonucleotide
ggcccaaaattttgtgaaaaa

SEQ ID NO: 28360 - RNA, 21 nt, synthetic construct
  source 1..21: mol_type = other RNA; note = Description of Artificial Sequence: Synthetic oligonucleotide
gggcccaaaattttgtgaaaa

SEQ ID NO: 28361 - RNA, 21 nt, synthetic construct
  source 1..21: mol_type = other RNA; note = Description of Artificial Sequence: Synthetic oligonucleotide
tgggcccaaaattttgtgaaa

SEQ ID NO: 28362 - RNA, 21 nt, synthetic construct
  source 1..21: mol_type = other RNA; note = Description of Artificial Sequence: Synthetic oligonucleotide
ttgggcccaaaattttgtgaa

SEQ ID NO: 28363 - RNA, 21 nt, synthetic construct
  source 1..21: mol_type = other RNA; note = Description of Artificial Sequence: Synthetic oligonucleotide
attgggcccaaaattttgtga

SEQ ID NO: 28364 - RNA, 21 nt, synthetic construct
  source 1..21: mol_type = other RNA; note = Description of Artificial Sequence: Synthetic oligonucleotide
aattgggcccaaaattttgtg

SEQ ID NO: 28365 - RNA, 21 nt, synthetic construct
  source 1..21: mol_type = other RNA; note = Description of Artificial Sequence: Synthetic oligonucleotide
gaattgggcccaaaattttgt

SEQ ID NO: 28366 - RNA, 21 nt, synthetic construct
  source 1..21: mol_type = other RNA; note = Description of Artificial Sequence: Synthetic oligonucleotide
ggaattgggcccaaaattttg

SEQ ID NO: 28367 - RNA, 21 nt, synthetic construct
  source 1..21: mol_type = other RNA; note = Description of Artificial Sequence: Synthetic oligonucleotide
gggaattgggcccaaaatttt

SEQ ID NO: 28368 - RNA, 21 nt, synthetic construct
  source 1..21: mol_type = other RNA; note = Description of Artificial Sequence: Synthetic oligonucleotide
ggggaattgggcccaaaattt

SEQ ID NO: 28369 - RNA, 21 nt, synthetic construct
  source 1..21: mol_type = other RNA; note = Description of Artificial Sequence: Synthetic oligonucleotide
aggggaattgggcccaaaatt

SEQ ID NO: 28370 - RNA, 21 nt, synthetic construct
  source 1..21: mol_type = other RNA; note = Description of Artificial Sequence: Synthetic oligonucleotide
taggggaattgggcccaaaat

SEQ ID NO: 28371 - RNA, 21 nt, synthetic construct
  source 1..21: mol_type = other RNA; note = Description of Artificial Sequence: Synthetic oligonucleotide
ttaggggaattgggcccaaaa

SEQ ID NO: 28372 - RNA, 21 nt, synthetic construct
  source 1..21: mol_type = other RNA; note = Description of Artificial Sequence: Synthetic oligonucleotide
tttaggggaattgggcccaaa

SEQ ID NO: 28373 - RNA, 21 nt, synthetic construct
  source 1..21: mol_type = other RNA; note = Description of Artificial Sequence: Synthetic oligonucleotide
ttttaggggaattgggcccaa

SEQ ID NO: 28374 - RNA, 21 nt, synthetic construct
  source 1..21: mol_type = other RNA; note = Description of Artificial Sequence: Synthetic oligonucleotide
cttttaggggaattgggccca

SEQ ID NO: 28375 - RNA, 21 nt, synthetic construct
  source 1..21: mol_type = other RNA; note = Description of Artificial Sequence: Synthetic oligonucleotide
tcttttaggggaattgggccc

SEQ ID NO: 28376 - RNA, 21 nt, synthetic construct
  source 1..21: mol_type = other RNA; note = Description of Artificial Sequence: Synthetic oligonucleotide
ttcttttaggggaattgggcc

SEQ ID NO: 28377 - RNA, 21 nt, synthetic construct
  source 1..21: mol_type = other RNA; note = Description of Artificial Sequence: Synthetic oligonucleotide
attcttttaggggaattgggc

SEQ ID NO: 28378 - RNA, 21 nt, synthetic construct
  source 1..21: mol_type = other RNA; note = Description of Artificial Sequence: Synthetic oligonucleotide
aattcttttaggggaattggg

SEQ ID NO: 28379 - RNA, 21 nt, synthetic construct
  source 1..21: mol_type = other RNA; note = Description of Artificial Sequence: Synthetic oligonucleotide
caattcttttaggggaattgg

SEQ ID NO: 28380 - RNA, 21 nt, synthetic construct
  source 1..21: mol_type = other RNA; note = Description of Artificial Sequence: Synthetic oligonucleotide
tcaattcttttaggggaattg

SEQ ID NO: 28381 - RNA, 21 nt, synthetic construct
  source 1..21: mol_type = other RNA; note = Description of Artificial Sequence: Synthetic oligonucleotide
ctcaattcttttaggggaatt

SEQ ID NO: 28382 - RNA, 21 nt, synthetic construct
  source 1..21: mol_type = other RNA; note = Description of Artificial Sequence: Synthetic oligonucleotide
cctcaattcttttaggggaat

SEQ ID NO: 28383 - RNA, 21 nt, synthetic construct
  source 1..21: mol_type = other RNA; note = Description of Artificial Sequence: Synthetic oligonucleotide
tcctcaattcttttaggggaa

SEQ ID NO: 28384 - RNA, 21 nt, synthetic construct
  source 1..21: mol_type = other RNA; note = Description of Artificial Sequence: Synthetic oligonucleotide
atcctcaattcttttagggga

SEQ ID NO: 28385 - RNA, 21 nt, synthetic construct
  source 1..21: mol_type = other RNA; note = Description of Artificial Sequence: Synthetic oligonucleotide
aatcctcaattcttttagggg

SEQ ID NO: 28386 - RNA, 21 nt, synthetic construct
  source 1..21: mol_type = other RNA; note = Description of Artificial Sequence: Synthetic oligonucleotide
taatcctcaattcttttaggg

SEQ ID NO: 28387 - RNA, 21 nt, synthetic construct
  source 1..21: mol_type = other RNA; note = Description of Artificial Sequence: Synthetic oligonucleotide
ctaatcctcaattcttttagg

SEQ ID NO: 28388 - RNA, 21 nt, synthetic construct
  source 1..21: mol_type = other RNA; note = Description of Artificial Sequence: Synthetic oligonucleotide
cctaatcctcaattcttttag

SEQ ID NO: 28389 - RNA, 21 nt, synthetic construct
  source 1..21: mol_type = other RNA; note = Description of Artificial Sequence: Synthetic oligonucleotide
ccctaatcctcaattctttta

SEQ ID NO: 28390 - RNA, 21 nt, synthetic construct
  source 1..21: mol_type = other RNA; note = Description of Artificial Sequence: Synthetic oligonucleotide
tccctaatcctcaattctttt

SEQ ID NO: 28391 - RNA, 21 nt, synthetic construct
  source 1..21: mol_type = other RNA; note = Description of Artificial Sequence: Synthetic oligonucleotide
ctccctaatcctcaattcttt

SEQ ID NO: 28392 - RNA, 21 nt, synthetic construct
  source 1..21: mol_type = other RNA; note = Description of Artificial Sequence: Synthetic oligonucleotide
tctccctaatcctcaattctt

SEQ ID NO: 28393 - RNA, 21 nt, synthetic construct
  source 1..21: mol_type = other RNA; note = Description of Artificial Sequence: Synthetic oligonucleotide
ttctccctaatcctcaattct

SEQ ID NO: 28394 - RNA, 21 nt, synthetic construct
  source 1..21: mol_type = other RNA; note = Description of Artificial Sequence: Synthetic oligonucleotide
tttctccctaatcctcaattc

SEQ ID NO: 28395 - RNA, 21 nt, synthetic construct
  source 1..21: mol_type = other RNA; note = Description of Artificial Sequence: Synthetic oligonucleotide
ctttctccctaatcctcaatt

SEQ ID NO: 28396 - RNA, 21 nt, synthetic construct
  source 1..21: mol_type = other RNA; note = Description of Artificial Sequence: Synthetic oligonucleotide
cctttctccctaatcctcaat

SEQ ID NO: 28397 - RNA, 21 nt, synthetic construct
  source 1..21: mol_type = other RNA; note = Description of Artificial Sequence: Synthetic oligonucleotide
tcctttctccctaatcctcaa

SEQ ID NO: 28398 - RNA, 21 nt, synthetic construct
  source 1..21: mol_type = other RNA; note = Description of Artificial Sequence: Synthetic oligonucleotide
ctcctttctccctaatcctca

SEQ ID NO: 28399 - RNA, 21 nt, synthetic construct
  source 1..21: mol_type = other RNA; note = Description of Artificial Sequence: Synthetic oligonucleotide
tctcctttctccctaatcctc

SEQ ID NO: 28400 - RNA, 21 nt, synthetic construct
  source 1..21: mol_type = other RNA; note = Description of Artificial Sequence: Synthetic oligonucleotide
gtctcctttctccctaatcct

SEQ ID NO: 28401 - RNA, 21 nt, synthetic construct
  source 1..21: mol_type = other RNA; note = Description of Artificial Sequence: Synthetic oligonucleotide
tgtctcctttctccctaatcc

SEQ ID NO: 28402 - RNA, 21 nt, synthetic construct
  source 1..21: mol_type = other RNA; note = Description of Artificial Sequence: Synthetic oligonucleotide
ttgtctcctttctccctaatc

SEQ ID NO: 28403 - RNA, 21 nt, synthetic construct
  source 1..21: mol_type = other RNA; note = Description of Artificial Sequence: Synthetic oligonucleotide
gttgtctcctttctccctaat

SEQ ID NO: 28404 - RNA, 21 nt, synthetic construct
  source 1..21: mol_type = other RNA; note = Description of Artificial Sequence: Synthetic oligonucleotide
agttgtctcctttctccctaa

SEQ ID NO: 28405 - RNA, 21 nt, synthetic construct
  source 1..21: mol_type = other RNA; note = Description of Artificial Sequence: Synthetic oligonucleotide
gagttgtctcctttctcccta

SEQ ID NO: 28406 - RNA, 21 nt, synthetic construct
  source 1..21: mol_type = other RNA; note = Description of Artificial Sequence: Synthetic oligonucleotide
tgagttgtctcctttctccct

SEQ ID NO: 28407 - RNA, 21 nt, synthetic construct
  source 1..21: mol_type = other RNA; note = Description of Artificial Sequence: Synthetic oligonucleotide
ttgagttgtctcctttctccc

SEQ ID NO: 28408 - RNA, 21 nt, synthetic construct
  source 1..21: mol_type = other RNA; note = Description of Artificial Sequence: Synthetic oligonucleotide
tttgagttgtctcctttctcc

SEQ ID NO: 28409 - RNA, 21 nt, synthetic construct
  source 1..21: mol_type = other RNA; note = Description of Artificial Sequence: Synthetic oligonucleotide
ctttgagttgtctcctttctc

SEQ ID NO: 28410 - RNA, 21 nt, synthetic construct
  source 1..21: mol_type = other RNA; note = Description of Artificial Sequence: Synthetic oligonucleotide
actttgagttgtctcctttct

SEQ ID NO: 28411 - RNA, 21 nt, synthetic construct
  source 1..21: mol_type = other RNA; note = Description of Artificial Sequence: Synthetic oligonucleotide
gactttgagttgtctcctttc

SEQ ID NO: 28412 - RNA, 21 nt, synthetic construct
  source 1..21: mol_type = other RNA; note = Description of Artificial Sequence: Synthetic oligonucleotide
tgactttgagttgtctccttt

SEQ ID NO: 28413 - RNA, 21 nt, synthetic construct
  source 1..21: mol_type = other RNA; note = Description of Artificial Sequence: Synthetic oligonucleotide
atgactttgagttgtctcctt

SEQ ID NO: 28414 - RNA, 21 nt, synthetic construct
  source 1..21: mol_type = other RNA; note = Description of Artificial Sequence: Synthetic oligonucleotide
gatgactttgagttgtctcct

SEQ ID NO: 28415 - RNA, 21 nt, synthetic construct
  source 1..21: mol_type = other RNA; note = Description of Artificial Sequence: Synthetic oligonucleotide
ggatgactttgagttgtctcc

SEQ ID NO: 28416 - RNA, 21 nt, synthetic construct
  source 1..21: mol_type = other RNA; note = Description of Artificial Sequence: Synthetic oligonucleotide
gggatgactttgagttgtctc

SEQ ID NO: 28417 - RNA, 21 nt, synthetic construct
  source 1..21: mol_type = other RNA; note = Description of Artificial Sequence: Synthetic oligonucleotide
tgggatgactttgagttgtct

SEQ ID NO: 28418 - RNA, 21 nt, synthetic construct
  source 1..21: mol_type = other RNA; note = Description of Artificial Sequence: Synthetic oligonucleotide
atgggatgactttgagttgtc

SEQ ID NO: 28419 - RNA, 21 nt, synthetic construct
  source 1..21: mol_type = other RNA; note = Description of Artificial Sequence: Synthetic oligonucleotide
aatgggatgactttgagttgt

SEQ ID NO: 28420 - RNA, 21 nt, synthetic construct
  source 1..21: mol_type = other RNA; note = Description of Artificial Sequence: Synthetic oligonucleotide
taatgggatgactttgagttg

SEQ ID NO: 28421 - RNA, 21 nt, synthetic construct
  source 1..21: mol_type = other RNA; note = Description of Artificial Sequence: Synthetic oligonucleotide
ttaatgggatgactttgagtt

SEQ ID NO: 28422 - RNA, 21 nt, synthetic construct
  source 1..21: mol_type = other RNA; note = Description of Artificial Sequence: Synthetic oligonucleotide
cttaatgggatgactttgagt

SEQ ID NO: 28423 - RNA, 21 nt, synthetic construct
  source 1..21: mol_type = other RNA; note = Description of Artificial Sequence: Synthetic oligonucleotide
acttaatgggatgactttgag

SEQ ID NO: 28424 - RNA, 21 nt, synthetic construct
  source 1..21: mol_type = other RNA; note = Description of Artificial Sequence: Synthetic oligonucleotide
cacttaatgggatgactttga

SEQ ID NO: 28425 - RNA, 21 nt, synthetic construct
  source 1..21: mol_type = other RNA; note = Description of Artificial Sequence: Synthetic oligonucleotide
gcacttaatgggatgactttg

SEQ ID NO: 28426 - RNA, 21 nt, synthetic construct
  source 1..21: mol_type = other RNA; note = Description of Artificial Sequence: Synthetic oligonucleotide
tgcacttaatgggatgacttt

SEQ ID NO: 28427 - RNA, 21 nt, synthetic construct
  source 1..21: mol_type = other RNA; note = Description of Artificial Sequence: Synthetic oligonucleotide
ctgcacttaatgggatgactt

SEQ ID NO: 28428 - RNA, 21 nt, synthetic construct
  source 1..21: mol_type = other RNA; note = Description of Artificial Sequence: Synthetic oligonucleotide
actgcacttaatgggatgact

SEQ ID NO: 28429 - RNA, 21 nt, synthetic construct
  source 1..21: mol_type = other RNA; note = Description of Artificial Sequence: Synthetic oligonucleotide
aactgcacttaatgggatgac

SEQ ID NO: 28430 - RNA, 21 nt, synthetic construct
  source 1..21: mol_type = other RNA; note = Description of Artificial Sequence: Synthetic oligonucleotide
aaactgcacttaatgggatga

SEQ ID NO: 28431 - RNA, 21 nt, synthetic construct
  source 1..21: mol_type = other RNA; note = Description of Artificial Sequence: Synthetic oligonucleotide
gaaactgcacttaatgggatg

SEQ ID NO: 28432 - RNA, 21 nt, synthetic construct
  source 1..21: mol_type = other RNA; note = Description of Artificial Sequence: Synthetic oligonucleotide
agaaactgcacttaatgggat

SEQ ID NO: 28433 - RNA, 21 nt, synthetic construct
  source 1..21: mol_type = other RNA; note = Description of Artificial Sequence: Synthetic oligonucleotide
aagaaactgcacttaatggga

SEQ ID NO: 28434 - RNA, 21 nt, synthetic construct
  source 1..21: mol_type = other RNA; note = Description of Artificial Sequence: Synthetic oligonucleotide
aaagaaactgcacttaatggg

SEQ ID NO: 28435 - RNA, 21 nt, synthetic construct
  source 1..21: mol_type = other RNA; note = Description of Artificial Sequence: Synthetic oligonucleotide
caaagaaactgcacttaatgg

SEQ ID NO: 28436 - RNA, 21 nt, synthetic construct
  source 1..21: mol_type = other RNA; note = Description of Artificial Sequence: Synthetic oligonucleotide
tcaaagaaactgcacttaatg

SEQ ID NO: 28437 - RNA, 21 nt, synthetic construct
  source 1..21: mol_type = other RNA; note = Description of Artificial Sequence: Synthetic oligonucleotide
ttcaaagaaactgcacttaat

SEQ ID NO: 28438 - RNA, 21 nt, synthetic construct
  source 1..21: mol_type = other RNA; note = Description of Artificial Sequence: Synthetic oligonucleotide
attcaaagaaactgcacttaa

SEQ ID NO: 28439 - RNA, 21 nt, synthetic construct
  source 1..21: mol_type = other RNA; note = Description of Artificial Sequence: Synthetic oligonucleotide
gattcaaagaaactgcactta

SEQ ID NO: 28440 - RNA, 21 nt, synthetic construct
  source 1..21: mol_type = other RNA; note = Description of Artificial Sequence: Synthetic oligonucleotide
agattcaaagaaactgcactt

SEQ ID NO: 28441 - RNA, 21 nt, synthetic construct
  source 1..21: mol_type = other RNA; note = Description of Artificial Sequence: Synthetic oligonucleotide
aagattcaaagaaactgcact

SEQ ID NO: 28442 - RNA, 21 nt, synthetic construct
  source 1..21: mol_type = other RNA; note = Description of Artificial Sequence: Synthetic oligonucleotide
gaagattcaaagaaactgcac

SEQ ID NO: 28443 - RNA, 21 nt, synthetic construct
  source 1..21: mol_type = other RNA; note = Description of Artificial Sequence: Synthetic oligonucleotide
agaagattcaaagaaactgca

SEQ ID NO: 28444 - RNA, 21 nt, synthetic construct
  source 1..21: mol_type = other RNA; note = Description of Artificial Sequence: Synthetic oligonucleotide
cagaagattcaaagaaactgc

SEQ ID NO: 28445 - RNA, 21 nt, synthetic construct
  source 1..21: mol_type = other RNA; note = Description of Artificial Sequence: Synthetic oligonucleotide
gcagaagattcaaagaaactg

SEQ ID NO: 28446 - RNA, 21 nt, synthetic construct
  source 1..21: mol_type = other RNA; note = Description of Artificial Sequence: Synthetic oligonucleotide
agcagaagattcaaagaaact

SEQ ID NO: 28447 - RNA, 21 nt, synthetic construct
  source 1..21: mol_type = other RNA; note = Description of Artificial Sequence: Synthetic oligonucleotide
aagcagaagattcaaagaaac

SEQ ID NO: 28448 - RNA, 21 nt, synthetic construct
  source 1..21: mol_type = other RNA; note = Description of Artificial Sequence: Synthetic oligonucleotide
aaagcagaagattcaaagaaa

SEQ ID NO: 28449 - RNA, 21 nt, synthetic construct
  source 1..21: mol_type = other RNA; note = Description of Artificial Sequence: Synthetic oligonucleotide
taaagcagaagattcaaagaa

SEQ ID NO: 28450 - RNA, 21 nt, synthetic construct
  source 1..21: mol_type = other RNA; note = Description of Artificial Sequence: Synthetic oligonucleotide
ataaagcagaagattcaaaga

SEQ ID NO: 28451 - RNA, 21 nt, synthetic construct
  source 1..21: mol_type = other RNA; note = Description of Artificial Sequence: Synthetic oligonucleotide
gataaagcagaagattcaaag

SEQ ID NO: 28452 - RNA, 21 nt, synthetic construct
  source 1..21: mol_type = other RNA; note = Description of Artificial Sequence: Synthetic oligonucleotide
agataaagcagaagattcaaa

SEQ ID NO: 28453 - RNA, 21 nt, synthetic construct
  source 1..21: mol_type = other RNA; note = Description of Artificial Sequence: Synthetic oligonucleotide
aagataaagcagaagattcaa

SEQ ID NO: 28454 - RNA, 21 nt, synthetic construct
  source 1..21: mol_type = other RNA; note = Description of Artificial Sequence: Synthetic oligonucleotide
aaagataaagcagaagattca

SEQ ID NO: 28455 - RNA, 21 nt, synthetic construct
  source 1..21: mol_type = other RNA; note = Description of Artificial Sequence: Synthetic oligonucleotide
taaagataaagcagaagattc

SEQ ID NO: 28456 - RNA, 21 nt, synthetic construct
  source 1..21: mol_type = other RNA; note = Description of Artificial Sequence: Synthetic oligonucleotide
ttaaagataaagcagaagatt

SEQ ID NO: 28457 - RNA, 21 nt, synthetic construct
  source 1..21: mol_type = other RNA; note = Description of Artificial Sequence: Synthetic oligonucleotide
tttaaagataaagcagaagat

SEQ ID NO: 28458 - RNA, 21 nt, synthetic construct
  source 1..21: mol_type = other RNA; note = Description of Artificial Sequence: Synthetic oligonucleotide
ttttaaagataaagcagaaga

SEQ ID NO: 28459 - RNA, 21 nt, synthetic construct
  source 1..21: mol_type = other RNA; note = Description of Artificial Sequence: Synthetic oligonucleotide
tttttaaagataaagcagaag

SEQ ID NO: 28460 - RNA, 21 nt, synthetic construct
  source 1..21: mol_type = other RNA; note = Description of Artificial Sequence: Synthetic oligonucleotide
atttttaaagataaagcagaa

SEQ ID NO: 28461 - RNA, 21 nt, synthetic construct
  source 1..21: mol_type = other RNA; note = Description of Artificial Sequence: Synthetic oligonucleotide
aatttttaaagataaagcaga

SEQ ID NO: 28462 - RNA, 21 nt, synthetic construct
  source 1..21: mol_type = other RNA; note = Description of Artificial Sequence: Synthetic oligonucleotide
aaatttttaaagataaagcag

SEQ ID NO: 28463 - RNA, 21 nt, synthetic construct
  source 1..21: mol_type = other RNA; note = Description of Artificial Sequence: Synthetic oligonucleotide
caaatttttaaagataaagca

SEQ ID NO: 28464 - RNA, 21 nt, synthetic construct
  source 1..21: mol_type = other RNA; note = Description of Artificial Sequence: Synthetic oligonucleotide
acaaatttttaaagataaagc

SEQ ID NO: 28465 - RNA, 21 nt, synthetic construct
  source 1..21: mol_type = other RNA; note = Description of Artificial Sequence: Synthetic oligonucleotide
tacaaatttttaaagataaag

SEQ ID NO: 28466 - RNA, 21 nt, synthetic construct
  source 1..21: mol_type = other RNA; note = Description of Artificial Sequence: Synthetic oligonucleotide
atacaaatttttaaagataaa

SEQ ID NO: 28467 - RNA, 21 nt, synthetic construct
  source 1..21: mol_type = other RNA; note = Description of Artificial Sequence: Synthetic oligonucleotide
tatacaaatttttaaagataa

SEQ ID NO: 28468 - RNA, 21 nt, synthetic construct
  source 1..21: mol_type = other RNA; note = Description of Artificial Sequence: Synthetic oligonucleotide
ttatacaaatttttaaagata

SEQ ID NO: 28469 - RNA, 21 nt, synthetic construct
  source 1..21: mol_type = other RNA; note = Description of Artificial Sequence: Synthetic oligonucleotide
attatacaaatttttaaagat

SEQ ID NO: 28470 - RNA, 21 nt, synthetic construct
  source 1..21: mol_type = other RNA; note = Description of Artificial Sequence: Synthetic oligonucleotide
aattatacaaatttttaaaga

SEQ ID NO: 28471 - RNA, 21 nt, synthetic construct
  source 1..21: mol_type = other RNA; note = Description of Artificial Sequence: Synthetic oligonucleotide
aaattatacaaatttttaaag

SEQ ID NO: 28472 - RNA, 21 nt, synthetic construct
  source 1..21: mol_type = other RNA; note = Description of Artificial Sequence: Synthetic oligonucleotide
taaattatacaaatttttaaa

SEQ ID NO: 28473 - RNA, 21 nt, synthetic construct
  source 1..21: mol_type = other RNA; note = Description of Artificial Sequence: Synthetic oligonucleotide
ataaattatacaaatttttaa

SEQ ID NO: 28474 - RNA, 21 nt, synthetic construct
  source 1..21: mol_type = other RNA; note = Description of Artificial Sequence: Synthetic oligonucleotide
tataaattatacaaattttta

SEQ ID NO: 28475 - RNA, 21 nt, synthetic construct
  source 1..21: mol_type = other RNA; note = Description of Artificial Sequence: Synthetic oligonucleotide
atataaattatacaaattttt

SEQ ID NO: 28476 - RNA, 21 nt, synthetic construct
  source 1..21: mol_type = other RNA; note = Description of Artificial Sequence: Synthetic oligonucleotide
tatataaattatacaaatttt

SEQ ID NO: 28477 - RNA, 21 nt, synthetic construct
  source 1..21: mol_type = other RNA; note = Description of Artificial Sequence: Synthetic oligonucleotide
atatataaattatacaaattt

SEQ ID NO: 28478 - RNA, 21 nt, synthetic construct
  source 1..21: mol_type = other RNA; note = Description of Artificial Sequence: Synthetic oligonucleotide
aatatataaattatacaaatt

SEQ ID NO: 28479 - RNA, 21 nt, synthetic construct
  source 1..21: mol_type = other RNA; note = Description of Artificial Sequence: Synthetic oligonucleotide
aaatatataaattatacaaat

SEQ ID NO: 28480 - RNA, 21 nt, synthetic construct
  source 1..21: mol_type = other RNA; note = Description of Artificial Sequence: Synthetic oligonucleotide
aaaatatataaattatacaaa

SEQ ID NO: 28481 - RNA, 21 nt, synthetic construct
  source 1..21: mol_type = other RNA; note = Description of Artificial Sequence: Synthetic oligonucleotide
taaaatatataaattatacaa

SEQ ID NO: 28482 - RNA, 21 nt, synthetic construct
  source 1..21: mol_type = other RNA; note = Description of Artificial Sequence: Synthetic oligonucleotide
ataaaatatataaattataca

SEQ ID NO: 28483 - RNA, 21 nt, synthetic construct
  source 1..21: mol_type = other RNA; note = Description of Artificial Sequence: Synthetic oligonucleotide
aataaaatatataaattatac

SEQ ID NO: 28484 - RNA, 21 nt, synthetic construct
  source 1..21: mol_type = other RNA; note = Description of Artificial Sequence: Synthetic oligonucleotide
gaataaaatatataaattata

SEQ ID NO: 28485 - RNA, 21 nt, synthetic construct
  source 1..21: mol_type = other RNA; note = Description of Artificial Sequence: Synthetic oligonucleotide
agaataaaatatataaattat

SEQ ID NO: 28486 - RNA, 21 nt, synthetic construct
  source 1..21: mol_type = other RNA; note = Description of Artificial Sequence: Synthetic oligonucleotide
tagaataaaatatataaatta

SEQ ID NO: 28487 - RNA, 21 nt, synthetic construct
  source 1..21: mol_type = other RNA; note = Description of Artificial Sequence: Synthetic oligonucleotide
atagaataaaatatataaatt

SEQ ID NO: 28488 - RNA, 21 nt, synthetic construct
  source 1..21: mol_type = other RNA; note = Description of Artificial Sequence: Synthetic oligonucleotide
catagaataaaatatataaat

SEQ ID NO: 28489 - RNA, 21 nt, synthetic construct
  source 1..21: mol_type = other RNA; note = Description of Artificial Sequence: Synthetic oligonucleotide
acatagaataaaatatataaa

SEQ ID NO: 28490 - RNA, 21 nt, synthetic construct
  source 1..21: mol_type = other RNA; note = Description of Artificial Sequence: Synthetic oligonucleotide
cacatagaataaaatatataa

SEQ ID NO: 28491 - RNA, 21 nt, synthetic construct
  source 1..21: mol_type = other RNA; note = Description of Artificial Sequence: Synthetic oligonucleotide
acacatagaataaaatatata

SEQ ID NO: 28492 - RNA, 21 nt, synthetic construct
  source 1..21: mol_type = other RNA; note = Description of Artificial Sequence: Synthetic oligonucleotide
aacacatagaataaaatatat

SEQ ID NO: 28493 - RNA, 21 nt, synthetic construct
  source 1..21: mol_type = other RNA; note = Description of Artificial Sequence: Synthetic oligonucleotide
gaacacatagaataaaatata

SEQ ID NO: 28494 - RNA, 21 nt, synthetic construct
  source 1..21: mol_type = other RNA; note = Description of Artificial Sequence: Synthetic oligonucleotide
ggaacacatagaataaaatat

SEQ ID NO: 28495 - RNA, 21 nt, synthetic construct
  source 1..21: mol_type = other RNA; note = Description of Artificial Sequence: Synthetic oligonucleotide
tggaacacatagaataaaata

SEQ ID NO: 28496 - RNA, 21 nt, synthetic construct
  source 1..21: mol_type = other RNA; note = Description of Artificial Sequence: Synthetic oligonucleotide
atggaacacatagaataaaat

SEQ ID NO: 28497 - RNA, 21 nt, synthetic construct
  source 1..21: mol_type = other RNA; note = Description of Artificial Sequence: Synthetic oligonucleotide
tatggaacacatagaataaaa

SEQ ID NO: 28498 - RNA, 21 nt, synthetic construct
  source 1..21: mol_type = other RNA; note = Description of Artificial Sequence: Synthetic oligonucleotide
ctatggaacacatagaataaa

SEQ ID NO: 28499 - RNA, 21 nt, synthetic construct
  source 1..21: mol_type = other RNA; note = Description of Artificial Sequence: Synthetic oligonucleotide
tctatggaacacatagaataa

SEQ ID NO: 28500 - RNA, 21 nt, synthetic construct
  source 1..21: mol_type = other RNA; note = Description of Artificial Sequence: Synthetic oligonucleotide
atctatggaacacatagaata

SEQ ID NO: 28501 - RNA, 21 nt, synthetic construct
  source 1..21: mol_type = other RNA; note = Description of Artificial Sequence: Synthetic oligonucleotide
tatctatggaacacatagaat

SEQ ID NO: 28502 - RNA, 21 nt, synthetic construct
  source 1..21: mol_type = other RNA; note = Description of Artificial Sequence: Synthetic oligonucleotide
atatctatggaacacatagaa

SEQ ID NO: 28503 - RNA, 21 nt, synthetic construct
  source 1..21: mol_type = other RNA; note = Description of Artificial Sequence: Synthetic oligonucleotide
gatatctatggaacacataga

SEQ ID NO: 28504 - RNA, 21 nt, synthetic construct
  source 1..21: mol_type = other RNA; note = Description of Artificial Sequence: Synthetic oligonucleotide
agatatctatggaacacatag

SEQ ID NO: 28505 - RNA, 21 nt, synthetic construct
  source 1..21: mol_type = other RNA; note = Description of Artificial Sequence: Synthetic oligonucleotide
aagatatctatggaacacata

SEQ ID NO: 28506 - RNA, 21 nt, synthetic construct
  source 1..21: mol_type = other RNA; note = Description of Artificial Sequence: Synthetic oligonucleotide
taagatatctatggaacacat

SEQ ID NO: 28507 - RNA, 21 nt, synthetic construct
  source 1..21: mol_type = other RNA; note = Description of Artificial Sequence: Synthetic oligonucleotide
ttaagatatctatggaacaca

SEQ ID NO: 28508 - RNA, 21 nt, synthetic construct
  source 1..21: mol_type = other RNA; note = Description of Artificial Sequence: Synthetic oligonucleotide
attaagatatctatggaacac

SEQ ID NO: 28509 - RNA, 21 nt, synthetic construct
  source 1..21: mol_type = other RNA; note = Description of Artificial Sequence: Synthetic oligonucleotide
cattaagatatctatggaaca

SEQ ID NO: 28510 - RNA, 21 nt, synthetic construct
  source 1..21: mol_type = other RNA; note = Description of Artificial Sequence: Synthetic oligonucleotide
acattaagatatctatggaac

SEQ ID NO: 28511 - RNA, 21 nt, synthetic construct
  source 1..21: mol_type = other RNA; note = Description of Artificial Sequence: Synthetic oligonucleotide
tacattaagatatctatggaa

SEQ ID NO: 28512 - RNA, 21 nt, synthetic construct
  source 1..21: mol_type = other RNA; note = Description of Artificial Sequence: Synthetic oligonucleotide
ttacattaagatatctatgga

SEQ ID NO: 28513 - RNA, 21 nt, synthetic construct
  source 1..21: mol_type = other RNA; note = Description of Artificial Sequence: Synthetic oligonucleotide
tttacattaagatatctatgg

SEQ ID NO: 28514 - RNA, 21 nt, synthetic construct
  source 1..21: mol_type = other RNA; note = Description of Artificial Sequence: Synthetic oligonucleotide
ttttacattaagatatctatg

SEQ ID NO: 28515 - RNA, 21 nt, synthetic construct
  source 1..21: mol_type = other RNA; note = Description of Artificial Sequence: Synthetic oligonucleotide
attttacattaagatatctat

SEQ ID NO: 28516 - RNA, 21 nt, synthetic construct
  source 1..21: mol_type = other RNA; note = Description of Artificial Sequence: Synthetic oligonucleotide
aattttacattaagatatcta

SEQ ID NO: 28517 - RNA, 21 nt, synthetic construct
  source 1..21: mol_type = other RNA; note = Description of Artificial Sequence: Synthetic oligonucleotide
taattttacattaagatatct

SEQ ID NO: 28518 - RNA, 21 nt, synthetic construct
  source 1..21: mol_type = other RNA; note = Description of Artificial Sequence: Synthetic oligonucleotide
ctaattttacattaagatatc

SEQ ID NO: 28519 - RNA, 21 nt, synthetic construct
  source 1..21: mol_type = other RNA; note = Description of Artificial Sequence: Synthetic oligonucleotide
actaattttacattaagatat

SEQ ID NO: 28520 - RNA, 21 nt, synthetic construct
  source 1..21: mol_type = other RNA; note = Description of Artificial Sequence: Synthetic oligonucleotide
gactaattttacattaagata

SEQ ID NO: 28521 - RNA, 21 nt, synthetic construct
  source 1..21: mol_type = other RNA; note = Description of Artificial Sequence: Synthetic oligonucleotide
tgactaattttacattaagat

SEQ ID NO: 28522 - RNA, 21 nt, synthetic construct
  source 1..21: mol_type = other RNA; note = Description of Artificial Sequence: Synthetic oligonucleotide
atgactaattttacattaaga

SEQ ID NO: 28523 - RNA, 21 nt, synthetic construct
  source 1..21: mol_type = other RNA; note = Description of Artificial Sequence: Synthetic oligonucleotide
aatgactaattttacattaag

SEQ ID NO: 28524 - RNA, 21 nt, synthetic construct
  source 1..21: mol_type = other RNA; note = Description of Artificial Sequence: Synthetic oligonucleotide
aaatgactaattttacattaa

SEQ ID NO: 28525 - RNA, 21 nt, synthetic construct
  source 1..21: mol_type = other RNA; note = Description of Artificial Sequence: Synthetic oligonucleotide
taaatgactaattttacatta

SEQ ID NO: 28526 - RNA, 21 nt, synthetic construct
  source 1..21: mol_type = other RNA; note = Description of Artificial Sequence: Synthetic oligonucleotide
ttaaatgactaattttacatt

SEQ ID NO: 28527 - RNA, 21 nt, synthetic construct
  source 1..21: mol_type = other RNA; note = Description of Artificial Sequence: Synthetic oligonucleotide
tttaaatgactaattttacat

SEQ ID NO: 28528 - RNA, 21 nt, synthetic construct
  source 1..21: mol_type = other RNA; note = Description of Artificial Sequence: Synthetic oligonucleotide
atttaaatgactaattttaca

SEQ ID NO: 28529 - RNA, 21 nt, synthetic construct
  source 1..21: mol_type = other RNA; note = Description of Artificial Sequence: Synthetic oligonucleotide
aatttaaatgactaattttac

SEQ ID NO: 28530 - RNA, 21 nt, synthetic construct
  source 1..21: mol_type = other RNA; note = Description of Artificial Sequence: Synthetic oligonucleotide
taatttaaatgactaatttta

SEQ ID NO: 28531 - RNA, 21 nt, synthetic construct
  source 1..21: mol_type = other RNA; note = Description of Artificial Sequence: Synthetic oligonucleotide
gtaatttaaatgactaatttt

SEQ ID NO: 28532 - RNA, 21 nt, synthetic construct
  source 1..21: mol_type = other RNA; note = Description of Artificial Sequence: Synthetic oligonucleotide
tgtaatttaaatgactaattt

SEQ ID NO: 28533 - RNA, 21 nt, synthetic construct
  source 1..21: mol_type = other RNA; note = Description of Artificial Sequence: Synthetic oligonucleotide
gtgtaatttaaatgactaatt

SEQ ID NO: 28534 - RNA, 21 nt, synthetic construct
  source 1..21: mol_type = other RNA; note = Description of Artificial Sequence: Synthetic oligonucleotide
agtgtaatttaaatgactaat

SEQ ID NO: 28535 - RNA, 21 nt, synthetic construct
  source 1..21: mol_type = other RNA; note = Description of Artificial Sequence: Synthetic oligonucleotide
cagtgtaatttaaatgactaa

SEQ ID NO: 28536 - RNA, 21 nt, synthetic construct
  source 1..21: mol_type = other RNA; note = Description of Artificial Sequence: Synthetic oligonucleotide
acagtgtaatttaaatgacta

SEQ ID NO: 28537 - RNA, 21 nt, synthetic construct
  source 1..21: mol_type = other RNA; note = Description of Artificial Sequence: Synthetic oligonucleotide
gacagtgtaatttaaatgact

SEQ ID NO: 28538 - RNA, 21 nt, synthetic construct
  source 1..21: mol_type = other RNA; note = Description of Artificial Sequence: Synthetic oligonucleotide
tgacagtgtaatttaaatgac

SEQ ID NO: 28539 - RNA, 21 nt, synthetic construct
  source 1..21: mol_type = other RNA; note = Description of Artificial Sequence: Synthetic oligonucleotide
ttgacagtgtaatttaaatga

SEQ ID NO: 28540 - RNA, 21 nt, synthetic construct
  source 1..21: mol_type = other RNA; note = Description of Artificial Sequence: Synthetic oligonucleotide
attgacagtgtaatttaaatg

SEQ ID NO: 28541 - RNA, 21 nt, synthetic construct
  source 1..21: mol_type = other RNA; note = Description of Artificial Sequence: Synthetic oligonucleotide
aattgacagtgtaatttaaat

SEQ ID NO: 28542 - RNA, 21 nt, synthetic construct
  source 1..21: mol_type = other RNA; note = Description of Artificial Sequence: Synthetic oligonucleotide
taattgacagtgtaatttaaa

SEQ ID NO: 28543 - RNA, 21 nt, synthetic construct
  source 1..21: mol_type = other RNA; note = Description of Artificial Sequence: Synthetic oligonucleotide
ttaattgacagtgtaatttaa

SEQ ID NO: 28544 - RNA, 21 nt, synthetic construct
  source 1..21: mol_type = other RNA; note = Description of Artificial Sequence: Synthetic oligonucleotide
tttaattgacagtgtaattta

SEQ ID NO: 28545 - RNA, 21 nt, synthetic construct
  source 1..21: mol_type = other RNA; note = Description of Artificial Sequence: Synthetic oligonucleotide
ttttaattgacagtgtaattt

SEQ ID NO: 28546 - RNA, 21 nt, synthetic construct
  source 1..21: mol_type = other RNA; note = Description of Artificial Sequence: Synthetic oligonucleotide
cttttaattgacagtgtaatt

SEQ ID NO: 28547 - RNA, 21 nt, synthetic construct
  source 1..21: mol_type = other RNA; note = Description of Artificial Sequence: Synthetic oligonucleotide
acttttaattgacagtgtaat

SEQ ID NO: 28548 - RNA, 21 nt, synthetic construct
  source 1..21: mol_type = other RNA; note = Description of Artificial Sequence: Synthetic oligonucleotide
tacttttaattgacagtgtaa

SEQ ID NO: 28549 - RNA, 21 nt, synthetic construct
  source 1..21: mol_type = other RNA; note = Description of Artificial Sequence: Synthetic oligonucleotide
ttacttttaattgacagtgta

SEQ ID NO: 28550 - RNA, 21 nt, synthetic construct
  source 1..21: mol_type = other RNA; note = Description of Artificial Sequence: Synthetic oligonucleotide
attacttttaattgacagtgt

SEQ ID NO: 28551 - RNA, 21 nt, synthetic construct
  source 1..21: mol_type = other RNA; note = Description of Artificial Sequence: Synthetic oligonucleotide
cattacttttaattgacagtg

SEQ ID NO: 28552 - RNA, 21 nt, synthetic construct
  source 1..21: mol_type = other RNA; note = Description of Artificial Sequence: Synthetic oligonucleotide
ccattacttttaattgacagt

SEQ ID NO: 28553 - RNA, 21 nt, synthetic construct
  source 1..21: mol_type = other RNA; note = Description of Artificial Sequence: Synthetic oligonucleotide
cccattacttttaattgacag

SEQ ID NO: 28554 - RNA, 21 nt, synthetic construct
  source 1..21: mol_type = other RNA; note = Description of Artificial Sequence: Synthetic oligonucleotide
gcccattacttttaattgaca

SEQ ID NO: 28555 - RNA, 21 nt, synthetic construct
  source 1..21: mol_type = other RNA; note = Description of Artificial Sequence: Synthetic oligonucleotide
tgcccattacttttaattgac

SEQ ID NO: 28556 - RNA, 21 nt, synthetic construct
  source 1..21: mol_type = other RNA; note = Description of Artificial Sequence: Synthetic oligonucleotide
ttgcccattacttttaattga

SEQ ID NO: 28557 - RNA, 21 nt, synthetic construct
  source 1..21: mol_type = other RNA; note = Description of Artificial Sequence: Synthetic oligonucleotide
cttgcccattacttttaattg

SEQ ID NO: 28558 - RNA, 21 nt, synthetic construct
  source 1..21: mol_type = other RNA; note = Description of Artificial Sequence: Synthetic oligonucleotide
tcttgcccattacttttaatt

SEQ ID NO: 28559 - RNA, 21 nt, synthetic construct
  source 1..21: mol_type = other RNA; note = Description of Artificial Sequence: Synthetic oligonucleotide
ctcttgcccattacttttaat

SEQ ID NO: 28560 - RNA, 21 nt, synthetic construct
  source 1..21: mol_type = other RNA; note = Description of Artificial Sequence: Synthetic oligonucleotide
tctcttgcccattacttttaa

SEQ ID NO: 28561 - RNA, 21 nt, synthetic construct
  source 1..21: mol_type = other RNA; note = Description of Artificial Sequence: Synthetic oligonucleotide
atctcttgcccattactttta

SEQ ID NO: 28562 - RNA, 21 nt, synthetic construct
  source 1..21: mol_type = other RNA; note = Description of Artificial Sequence: Synthetic oligonucleotide
aatctcttgcccattactttt

SEQ ID NO: 28563 - RNA, 21 nt, synthetic construct
  source 1..21: mol_type = other RNA; note = Description of Artificial Sequence: Synthetic oligonucleotide
caatctcttgcccattacttt

SEQ ID NO: 28564 - RNA, 21 nt, synthetic construct
  source 1..21: mol_type = other RNA; note = Description of Artificial Sequence: Synthetic oligonucleotide
gcaatctcttgcccattactt

SEQ ID NO: 28565 - RNA, 21 nt, synthetic construct
  source 1..21: mol_type = other RNA; note = Description of Artificial Sequence: Synthetic oligonucleotide
tgcaatctcttgcccattact

SEQ ID NO: 28566 - RNA, 21 nt, synthetic construct
  source 1..21: mol_type = other RNA; note = Description of Artificial Sequence: Synthetic oligonucleotide
atgcaatctcttgcccattac

SEQ ID NO: 28567 - RNA, 21 nt, synthetic construct
  source 1..21: mol_type = other RNA; note = Description of Artificial Sequence: Synthetic oligonucleotide
gatgcaatctcttgcccatta

SEQ ID NO: 28568 - RNA, 21 nt, synthetic construct
  source 1..21: mol_type = other RNA; note = Description of Artificial Sequence: Synthetic oligonucleotide
tgatgcaatctcttgcccatt

SEQ ID NO: 28569 - RNA, 21 nt, synthetic construct
  source 1..21: mol_type = other RNA; note = Description of Artificial Sequence: Synthetic oligonucleotide
atgatgcaatctcttgcccat

SEQ ID NO: 28570 - RNA, 21 nt, synthetic construct
  source 1..21: mol_type = other RNA; note = Description of Artificial Sequence: Synthetic oligonucleotide
tatgatgcaatctcttgccca

SEQ ID NO: 28571 - RNA, 21 nt, synthetic construct
  source 1..21: mol_type = other RNA; note = Description of Artificial Sequence: Synthetic oligonucleotide
gtatgatgcaatctcttgccc

SEQ ID NO: 28572 - RNA, 21 nt, synthetic construct
  source 1..21: mol_type = other RNA; note = Description of Artificial Sequence: Synthetic oligonucleotide
agtatgatgcaatctcttgcc

SEQ ID NO: 28573 - RNA, 21 nt, synthetic construct
  source 1..21: mol_type = other RNA; note = Description of Artificial Sequence: Synthetic oligonucleotide
tagtatgatgcaatctcttgc

SEQ ID NO: 28574 - RNA, 21 nt, synthetic construct
  source 1..21: mol_type = other RNA; note = Description of Artificial Sequence: Synthetic oligonucleotide
ttagtatgatgcaatctcttg

SEQ ID NO: 28575 - RNA, 21 nt, synthetic construct
  source 1..21: mol_type = other RNA; note = Description of Artificial Sequence: Synthetic oligonucleotide
attagtatgatgcaatctctt

SEQ ID NO: 28576 - RNA, 21 nt, synthetic construct
  source 1..21: mol_type = other RNA; note = Description of Artificial Sequence: Synthetic oligonucleotide
aattagtatgatgcaatctct

SEQ ID NO: 28577 - RNA, 21 nt, synthetic construct
  source 1..21: mol_type = other RNA; note = Description of Artificial Sequence: Synthetic oligonucleotide
aaattagtatgatgcaatctc

SEQ ID NO: 28578 - RNA, 21 nt, synthetic construct
  source 1..21: mol_type = other RNA; note = Description of Artificial Sequence: Synthetic oligonucleotide
taaattagtatgatgcaatct

SEQ ID NO: 28579 - RNA, 21 nt, synthetic construct
  source 1..21: mol_type = other RNA; note = Description of Artificial Sequence: Synthetic oligonucleotide
ctaaattagtatgatgcaatc

SEQ ID NO: 28580 - RNA, 21 nt, synthetic construct
  source 1..21: mol_type = other RNA; note = Description of Artificial Sequence: Synthetic oligonucleotide
actaaattagtatgatgcaat

SEQ ID NO: 28581 - RNA, 21 nt, synthetic construct
  source 1..21: mol_type = other RNA; note = Description of Artificial Sequence: Synthetic oligonucleotide
tactaaattagtatgatgcaa

SEQ ID NO: 28582 - RNA, 21 nt, synthetic construct
  source 1..21: mol_type = other RNA; note = Description of Artificial Sequence: Synthetic oligonucleotide
ttactaaattagtatgatgca

SEQ ID NO: 28583 - RNA, 21 nt, synthetic construct
  source 1..21: mol_type = other RNA; note = Description of Artificial Sequence: Synthetic oligonucleotide
cttactaaattagtatgatgc

SEQ ID NO: 28584 - RNA, 21 nt, synthetic construct
  source 1..21: mol_type = other RNA; note = Description of Artificial Sequence: Synthetic oligonucleotide
tcttactaaattagtatgatg

SEQ ID NO: 28585 - RNA, 21 nt, synthetic construct
  source 1..21: mol_type = other RNA; note = Description of Artificial Sequence: Synthetic oligonucleotide
ttcttactaaattagtatgat

SEQ ID NO: 28586 - RNA, 21 nt, synthetic construct
  source 1..21: mol_type = other RNA; note = Description of Artificial Sequence: Synthetic oligonucleotide
gttcttactaaattagtatga

SEQ ID NO: 28587 - RNA, 21 nt, synthetic construct
  source 1..21: mol_type = other RNA; note = Description of Artificial Sequence: Synthetic oligonucleotide
cgttcttactaaattagtatg

SEQ ID NO: 28588 - RNA, 21 nt, synthetic construct
  source 1..21: mol_type = other RNA; note = Description of Artificial Sequence: Synthetic oligonucleotide
acgttcttactaaattagtat

SEQ ID NO: 28589 - RNA, 21 nt, synthetic construct
  source 1..21: mol_type = other RNA; note = Description of Artificial Sequence: Synthetic oligonucleotide
aacgttcttactaaattagta

SEQ ID NO: 28590 - RNA, 21 nt, synthetic construct
  source 1..21: mol_type = other RNA; note = Description of Artificial Sequence: Synthetic oligonucleotide
gaacgttcttactaaattagt

SEQ ID NO: 28591 - RNA, 21 nt, synthetic construct
  source 1..21: mol_type = other RNA; note = Description of Artificial Sequence: Synthetic oligonucleotide
ggaacgttcttactaaattag

SEQ ID NO: 28592 - RNA, 21 nt, synthetic construct
  source 1..21: mol_type = other RNA; note = Description of Artificial Sequence: Synthetic oligonucleotide
gggaacgttcttactaaatta

SEQ ID NO: 28593 - RNA, 21 nt, synthetic construct
  source 1..21: mol_type = other RNA; note = Description of Artificial Sequence: Synthetic oligonucleotide
tgggaacgttcttactaaatt

SEQ ID NO: 28594 - RNA, 21 nt, synthetic construct
  source 1..21: mol_type = other RNA; note = Description of Artificial Sequence: Synthetic oligonucleotide
ttgggaacgttcttactaaat

SEQ ID NO: 28595 - RNA, 21 nt, synthetic construct
  source 1..21: mol_type = other RNA; note = Description of Artificial Sequence: Synthetic oligonucleotide
tttgggaacgttcttactaaa

SEQ ID NO: 28596 - RNA, 21 nt, synthetic construct
  source 1..21: mol_type = other RNA; note = Description of Artificial Sequence: Synthetic oligonucleotide
atttgggaacgttcttactaa

SEQ ID NO: 28597 - RNA, 21 nt, synthetic construct
  source 1..21: mol_type = other RNA; note = Description of Artificial Sequence: Synthetic oligonucleotide
catttgggaacgttcttacta

SEQ ID NO: 28598 - RNA, 21 nt, synthetic construct
  source 1..21: mol_type = other RNA; note = Description of Artificial Sequence: Synthetic oligonucleotide
acatttgggaacgttcttact

SEQ ID NO: 28599 - RNA, 21 nt, synthetic construct
  source 1..21: mol_type = other RNA; note = Description of Artificial Sequence: Synthetic oligonucleotide
aacatttgggaacgttcttac

SEQ ID NO: 28600 - RNA, 21 nt, synthetic construct
  source 1..21: mol_type = other RNA; note = Description of Artificial Sequence: Synthetic oligonucleotide
caacatttgggaacgttctta

SEQ ID NO: 28601 - RNA, 21 nt, synthetic construct
  source 1..21: mol_type = other RNA; note = Description of Artificial Sequence: Synthetic oligonucleotide
acaacatttgggaacgttctt

SEQ ID NO: 28602 - RNA, 21 nt, synthetic construct
  source 1..21: mol_type = other RNA; note = Description of Artificial Sequence: Synthetic oligonucleotide
tacaacatttgggaacgttct

SEQ ID NO: 28603 - RNA, 21 nt, synthetic construct
  source 1..21: mol_type = other RNA; note = Description of Artificial Sequence: Synthetic oligonucleotide
ttacaacatttgggaacgttc

SEQ ID NO: 28604 - RNA, 21 nt, synthetic construct
  source 1..21: mol_type = other RNA; note = Description of Artificial Sequence: Synthetic oligonucleotide
gttacaacatttgggaacgtt

SEQ ID NO: 28605 - RNA, 21 nt, synthetic construct
  source 1..21: mol_type = other RNA; note = Description of Artificial Sequence: Synthetic oligonucleotide
tgttacaacatttgggaacgt

SEQ ID NO: 28606 - RNA, 21 nt, synthetic construct
  source 1..21: mol_type = other RNA; note = Description of Artificial Sequence: Synthetic oligonucleotide
ttgttacaacatttgggaacg

SEQ ID NO: 28607 - RNA, 21 nt, synthetic construct
  source 1..21: mol_type = other RNA; note = Description of Artificial Sequence: Synthetic oligonucleotide
attgttacaacatttgggaac

SEQ ID NO: 28608 - RNA, 21 nt, synthetic construct
  source 1..21: mol_type = other RNA; note = Description of Artificial Sequence: Synthetic oligonucleotide
cattgttacaacatttgggaa

SEQ ID NO: 28609 - RNA, 21 nt, synthetic construct
  source 1..21: mol_type = other RNA; note = Description of Artificial Sequence: Synthetic oligonucleotide
acattgttacaacatttggga

SEQ ID NO: 28610 - RNA, 21 nt, synthetic construct
  source 1..21: mol_type = other RNA; note = Description of Artificial Sequence: Synthetic oligonucleotide
cacattgttacaacatttggg

SEQ ID NO: 28611 - RNA, 21 nt, synthetic construct
  source 1..21: mol_type = other RNA; note = Description of Artificial Sequence: Synthetic oligonucleotide
ccacattgttacaacatttgg

SEQ ID NO: 28612 - RNA, 21 nt, synthetic construct
  source 1..21: mol_type = other RNA; note = Description of Artificial Sequence: Synthetic oligonucleotide
tccacattgttacaacatttg

SEQ ID NO: 28613 - RNA, 21 nt, synthetic construct
  source 1..21: mol_type = other RNA; note = Description of Artificial Sequence: Synthetic oligonucleotide
atccacattgttacaacattt

SEQ ID NO: 28614 - RNA, 21 nt, synthetic construct
  source 1..21: mol_type = other RNA; note = Description of Artificial Sequence: Synthetic oligonucleotide
gatccacattgttacaacatt

SEQ ID NO: 28615 - RNA, 21 nt, synthetic construct
  source 1..21: mol_type = other RNA; note = Description of Artificial Sequence: Synthetic oligonucleotide
tgatccacattgttacaacat

SEQ ID NO: 28616 - RNA, 21 nt, synthetic construct
  source 1..21: mol_type = other RNA; note = Description of Artificial Sequence: Synthetic oligonucleotide
atgatccacattgttacaaca

SEQ ID NO: 28617 - RNA, 21 nt, synthetic construct
  source 1..21: mol_type = other RNA; note = Description of Artificial Sequence: Synthetic oligonucleotide
tatgatccacattgttacaac

SEQ ID NO: 28618 - RNA, 21 nt, synthetic construct
  source 1..21: mol_type = other RNA; note = Description of Artificial Sequence: Synthetic oligonucleotide
gtatgatccacattgttacaa

SEQ ID NO: 28619 - RNA, 21 nt, synthetic construct
  source 1..21: mol_type = other RNA; note = Description of Artificial Sequence: Synthetic oligonucleotide
tgtatgatccacattgttaca

SEQ ID NO: 28620 - RNA, 21 nt, synthetic construct
  source 1..21: mol_type = other RNA; note = Description of Artificial Sequence: Synthetic oligonucleotide
atgtatgatccacattgttac

SEQ ID NO: 28621 - RNA, 21 nt, synthetic construct
  source 1..21: mol_type = other RNA; note = Description of Artificial Sequence: Synthetic oligonucleotide
gatgtatgatccacattgtta

SEQ ID NO: 28622 - RNA, 21 nt, synthetic construct
  source 1..21: mol_type = other RNA; note = Description of Artificial Sequence: Synthetic oligonucleotide
agatgtatgatccacattgtt

SEQ ID NO: 28623 - RNA, 21 nt, synthetic construct
  source 1..21: mol_type = other RNA; note = Description of Artificial Sequence: Synthetic oligonucleotide
gagatgtatgatccacattgt

SEQ ID NO: 28624 - RNA, 21 nt, synthetic construct
  source 1..21: mol_type = other RNA; note = Description of Artificial Sequence: Synthetic oligonucleotide
agagatgtatgatccacattg

SEQ ID NO: 28625 - RNA, 21 nt, synthetic construct
  source 1..21: mol_type = other RNA; note = Description of Artificial Sequence: Synthetic oligonucleotide
cagagatgtatgatccacatt

SEQ ID NO: 28626 - RNA, 21 nt, synthetic construct
  source 1..21: mol_type = other RNA; note = Description of Artificial Sequence: Synthetic oligonucleotide
ccagagatgtatgatccacat

SEQ ID NO: 28627 - RNA, 21 nt, synthetic construct
  source 1..21: mol_type = other RNA; note = Description of Artificial Sequence: Synthetic oligonucleotide
accagagatgtatgatccaca

SEQ ID NO: 28628 - RNA, 21 nt, synthetic construct
  source 1..21: mol_type = other RNA; note = Description of Artificial Sequence: Synthetic oligonucleotide
aaccagagatgtatgatccac

SEQ ID NO: 28629 - RNA, 21 nt, synthetic construct
  source 1..21: mol_type = other RNA; note = Description of Artificial Sequence: Synthetic oligonucleotide
aaaccagagatgtatgatcca

SEQ ID NO: 28630 - RNA, 21 nt, synthetic construct
  source 1..21: mol_type = other RNA; note = Description of Artificial Sequence: Synthetic oligonucleotide
aaaaccagagatgtatgatcc

SEQ ID NO: 28631 - RNA, 21 nt, synthetic construct
  source 1..21: mol_type = other RNA; note = Description of Artificial Sequence: Synthetic oligonucleotide
aaaaaccagagatgtatgatc

SEQ ID NO: 28632 - RNA, 21 nt, synthetic construct
  source 1..21: mol_type = other RNA; note = Description of Artificial Sequence: Synthetic oligonucleotide
aaaaaaccagagatgtatgat

SEQ ID NO: 28633 - RNA, 21 nt, synthetic construct
  source 1..21: mol_type = other RNA; note = Description of Artificial Sequence: Synthetic oligonucleotide
taaaaaaccagagatgtatga

SEQ ID NO: 28634 - RNA, 21 nt, synthetic construct
  source 1..21: mol_type = other RNA; note = Description of Artificial Sequence: Synthetic oligonucleotide
ttaaaaaaccagagatgtatg

SEQ ID NO: 28635 - RNA, 21 nt, synthetic construct
  source 1..21: mol_type = other RNA; note = Description of Artificial Sequence: Synthetic oligonucleotide
tttaaaaaaccagagatgtat

SEQ ID NO: 28636 - RNA, 21 nt, synthetic construct
  source 1..21: mol_type = other RNA; note = Description of Artificial Sequence: Synthetic oligonucleotide
atttaaaaaaccagagatgta

SEQ ID NO: 28637 - RNA, 21 nt, synthetic construct
  source 1..21: mol_type = other RNA; note = Description of Artificial Sequence: Synthetic oligonucleotide
catttaaaaaaccagagatgt

SEQ ID NO: 28638 - RNA, 21 nt, synthetic construct
  source 1..21: mol_type = other RNA; note = Description of Artificial Sequence: Synthetic oligonucleotide
acatttaaaaaaccagagatg

SEQ ID NO: 28639 - RNA, 21 nt, synthetic construct
  source 1..21: mol_type = other RNA; note = Description of Artificial Sequence: Synthetic oligonucleotide
tacatttaaaaaaccagagat

SEQ ID NO: 28640 - RNA, 21 nt, synthetic construct
  source 1..21: mol_type = other RNA; note = Description of Artificial Sequence: Synthetic oligonucleotide
atacatttaaaaaaccagaga

SEQ ID NO: 28641 - RNA, 21 nt, synthetic construct
  source 1..21: mol_type = other RNA; note = Description of Artificial Sequence: Synthetic oligonucleotide
aatacatttaaaaaaccagag

SEQ ID NO: 28642 - RNA, 21 nt, synthetic construct
  source 1..21: mol_type = other RNA; note = Description of Artificial Sequence: Synthetic oligonucleotide
caatacatttaaaaaaccaga

SEQ ID NO: 28643 - RNA, 21 nt, synthetic construct
  source 1..21: mol_type = other RNA; note = Description of Artificial Sequence: Synthetic oligonucleotide
tcaatacatttaaaaaaccag

SEQ ID NO: 28644 - RNA, 21 nt, synthetic construct
  source 1..21: mol_type = other RNA; note = Description of Artificial Sequence: Synthetic oligonucleotide
ctcaatacatttaaaaaacca

SEQ ID NO: 28645 - RNA, 21 nt, synthetic construct
  source 1..21: mol_type = other RNA; note = Description of Artificial Sequence: Synthetic oligonucleotide
cctcaatacatttaaaaaacc

SEQ ID NO: 28646 - RNA, 21 nt, synthetic construct
  source 1..21: mol_type = other RNA; note = Description of Artificial Sequence: Synthetic oligonucleotide
gcctcaatacatttaaaaaac

SEQ ID NO: 28647 - RNA, 21 nt, synthetic construct
  source 1..21: mol_type = other RNA; note = Description of Artificial Sequence: Synthetic oligonucleotide
agcctcaatacatttaaaaaa

SEQ ID NO: 28648 - RNA, 21 nt, synthetic construct
  source 1..21: mol_type = other RNA; note = Description of Artificial Sequence: Synthetic oligonucleotide
aagcctcaatacatttaaaaa

SEQ ID NO: 28649 - RNA, 21 nt, synthetic construct
  source 1..21: mol_type = other RNA; note = Description of Artificial Sequence: Synthetic oligonucleotide
aaagcctcaatacatttaaaa

SEQ ID NO: 28650 - RNA, 21 nt, synthetic construct
  source 1..21: mol_type = other RNA; note = Description of Artificial Sequence: Synthetic oligonucleotide
gaaagcctcaatacatttaaa

SEQ ID NO: 28651 - RNA, 21 nt, synthetic construct
  source 1..21: mol_type = other RNA; note = Description of Artificial Sequence: Synthetic oligonucleotide
agaaagcctcaatacatttaa

SEQ ID NO: 28652 - RNA, 21 nt, synthetic construct
  source 1..21: mol_type = other RNA; note = Description of Artificial Sequence: Synthetic oligonucleotide
aagaaagcctcaatacattta

SEQ ID NO: 28653 - RNA, 21 nt, synthetic construct
  source 1..21: mol_type = other RNA; note = Description of Artificial Sequence: Synthetic oligonucleotide
caagaaagcctcaatacattt

SEQ ID NO: 28654 - RNA, 21 nt, synthetic construct
  source 1..21: mol_type = other RNA; note = Description of Artificial Sequence: Synthetic oligonucleotide
ccaagaaagcctcaatacatt

SEQ ID NO: 28655 - RNA, 21 nt, synthetic construct
  source 1..21: mol_type = other RNA; note = Description of Artificial Sequence: Synthetic oligonucleotide
accaagaaagcctcaatacat

SEQ ID NO: 28656 - RNA, 21 nt, synthetic construct
  source 1..21: mol_type = other RNA; note = Description of Artificial Sequence: Synthetic oligonucleotide
caccaagaaagcctcaataca

SEQ ID NO: 28657 - RNA, 21 nt, synthetic construct
  source 1..21: mol_type = other RNA; note = Description of Artificial Sequence: Synthetic oligonucleotide
ccaccaagaaagcctcaatac

SEQ ID NO: 28658 - RNA, 21 nt, synthetic construct
  source 1..21: mol_type = other RNA; note = Description of Artificial Sequence: Synthetic oligonucleotide
tccaccaagaaagcctcaata

SEQ ID NO: 28659 - RNA, 21 nt, synthetic construct
  source 1..21: mol_type = other RNA; note = Description of Artificial Sequence: Synthetic oligonucleotide
gtccaccaagaaagcctcaat

SEQ ID NO: 28660 - RNA, 21 nt, synthetic construct
  source 1..21: mol_type = other RNA; note = Description of Artificial Sequence: Synthetic oligonucleotide
agtccaccaagaaagcctcaa

SEQ ID NO: 28661 - RNA, 21 nt, synthetic construct
  source 1..21: mol_type = other RNA; note = Description of Artificial Sequence: Synthetic oligonucleotide
tagtccaccaagaaagcctca

SEQ ID NO: 28662 - RNA, 21 nt, synthetic construct
  source 1..21: mol_type = other RNA; note = Description of Artificial Sequence: Synthetic oligonucleotide
ctagtccaccaagaaagcctc

SEQ ID NO: 28663 - RNA, 21 nt, synthetic construct
  source 1..21: mol_type = other RNA; note = Description of Artificial Sequence: Synthetic oligonucleotide
actagtccaccaagaaagcct

SEQ ID NO: 28664 - RNA, 21 nt, synthetic construct
  source 1..21: mol_type = other RNA; note = Description of Artificial Sequence: Synthetic oligonucleotide
tactagtccaccaagaaagcc

SEQ ID NO: 28665 - RNA, 21 nt, synthetic construct
  source 1..21: mol_type = other RNA; note = Description of Artificial Sequence: Synthetic oligonucleotide
atactagtccaccaagaaagc

SEQ ID NO: 28666 - RNA, 21 nt, synthetic construct
  source 1..21: mol_type = other RNA; note = Description of Artificial Sequence: Synthetic oligonucleotide
tatactagtccaccaagaaag

SEQ ID NO: 28667 - RNA, 21 nt, synthetic construct
  source 1..21: mol_type = other RNA; note = Description of Artificial Sequence: Synthetic oligonucleotide
ctatactagtccaccaagaaa

SEQ ID NO: 28668 - RNA, 21 nt, synthetic construct
  source 1..21: mol_type = other RNA; note = Description of Artificial Sequence: Synthetic oligonucleotide
actatactagtccaccaagaa

SEQ ID NO: 28669 - RNA, 21 nt, synthetic construct
  source 1..21: mol_type = other RNA; note = Description of Artificial Sequence: Synthetic oligonucleotide
tactatactagtccaccaaga

SEQ ID NO: 28670 - RNA, 21 nt, synthetic construct
  source 1..21: mol_type = other RNA; note = Description of Artificial Sequence: Synthetic oligonucleotide
atactatactagtccaccaag

SEQ ID NO: 28671 - RNA, 21 nt, synthetic construct
  source 1..21: mol_type = other RNA; note = Description of Artificial Sequence: Synthetic oligonucleotide
tatactatactagtccaccaa

SEQ ID NO: 28672 - RNA, 21 nt, synthetic construct
  source 1..21: mol_type = other RNA; note = Description of Artificial Sequence: Synthetic oligonucleotide
gtatactatactagtccacca

SEQ ID NO: 28673 - RNA, 21 nt, synthetic construct
  source 1..21: mol_type = other RNA; note = Description of Artificial Sequence: Synthetic oligonucleotide
cgtatactatactagtccacc

SEQ ID NO: 28674 - RNA, 21 nt, synthetic construct
  source 1..21: mol_type = other RNA; note = Description of Artificial Sequence: Synthetic oligonucleotide
ccgtatactatactagtccac

SEQ ID NO: 28675 - RNA, 21 nt, synthetic construct
  source 1..21: mol_type = other RNA; note = Description of Artificial Sequence: Synthetic oligonucleotide
accgtatactatactagtcca

SEQ ID NO: 28676 - RNA, 21 nt, synthetic construct
  source 1..21: mol_type = other RNA; note = Description of Artificial Sequence: Synthetic oligonucleotide
gaccgtatactatactagtcc

SEQ ID NO: 28677 - RNA, 21 nt, synthetic construct
  source 1..21: mol_type = other RNA; note = Description of Artificial Sequence: Synthetic oligonucleotide
tgaccgtatactatactagtc

SEQ ID NO: 28678 - RNA, 21 nt, synthetic construct
  source 1..21: mol_type = other RNA; note = Description of Artificial Sequence: Synthetic oligonucleotide
ctgaccgtatactatactagt

SEQ ID NO: 28679 - RNA, 21 nt, synthetic construct
  source 1..21: mol_type = other RNA; note = Description of Artificial Sequence: Synthetic oligonucleotide
actgaccgtatactatactag

SEQ ID NO: 28680 - RNA, 21 nt, synthetic construct
  source 1..21: mol_type = other RNA; note = Description of Artificial Sequence: Synthetic oligonucleotide
aactgaccgtatactatacta

SEQ ID NO: 28681 - RNA, 21 nt, synthetic construct
  source 1..21: mol_type = other RNA; note = Description of Artificial Sequence: Synthetic oligonucleotide
taactgaccgtatactatact

SEQ ID NO: 28682 - RNA, 21 nt, synthetic construct
  source 1..21: mol_type = other RNA; note = Description of Artificial Sequence: Synthetic oligonucleotide
ataactgaccgtatactatac

SEQ ID NO: 28683 - RNA, 21 nt, synthetic construct
  source 1..21: mol_type = other RNA; note = Description of Artificial Sequence: Synthetic oligonucleotide
cataactgaccgtatactata

SEQ ID NO: 28684 - RNA, 21 nt, synthetic construct
  source 1..21: mol_type = other RNA; note = Description of Artificial Sequence: Synthetic oligonucleotide
acataactgaccgtatactat

SEQ ID NO: 28685 - RNA, 21 nt, synthetic construct
  source 1..21: mol_type = other RNA; note = Description of Artificial Sequence: Synthetic oligonucleotide
gacataactgaccgtatacta

SEQ ID NO: 28686 - RNA, 21 nt, synthetic construct
  source 1..21: mol_type = other RNA; note = Description of Artificial Sequence: Synthetic oligonucleotide
tgacataactgaccgtatact

SEQ ID NO: 28687 - RNA, 21 nt, synthetic construct
  source 1..21: mol_type = other RNA; note = Description of Artificial Sequence: Synthetic oligonucleotide
ttgacataactgaccgtatac

SEQ ID NO: 28688 - RNA, 21 nt, synthetic construct
  source 1..21: mol_type = other RNA; note = Description of Artificial Sequence: Synthetic oligonucleotide
attgacataactgaccgtata

SEQ ID NO: 28689 - RNA, 21 nt, synthetic construct
  source 1..21: mol_type = other RNA; note = Description of Artificial Sequence: Synthetic oligonucleotide
cattgacataactgaccgtat

SEQ ID NO: 28690 - RNA, 21 nt, synthetic construct
  source 1..21: mol_type = other RNA; note = Description of Artificial Sequence: Synthetic oligonucleotide
acattgacataactgaccgta

SEQ ID NO: 28691 - RNA, 21 nt, synthetic construct
  source 1..21: mol_type = other RNA; note = Description of Artificial Sequence: Synthetic oligonucleotide
aacattgacataactgaccgt

SEQ ID NO: 28692 - RNA, 21 nt, synthetic construct
  source 1..21: mol_type = other RNA; note = Description of Artificial Sequence: Synthetic oligonucleotide
aaacattgacataactgaccg

SEQ ID NO: 28693 - RNA, 21 nt, synthetic construct
  source 1..21: mol_type = other RNA; note = Description of Artificial Sequence: Synthetic oligonucleotide
gaaacattgacataactgacc

SEQ ID NO: 28694 - RNA, 21 nt, synthetic construct
  source 1..21: mol_type = other RNA; note = Description of Artificial Sequence: Synthetic oligonucleotide
tgaaacattgacataactgac

SEQ ID NO: 28695 - RNA, 21 nt, synthetic construct
  source 1..21: mol_type = other RNA; note = Description of Artificial Sequence: Synthetic oligonucleotide
atgaaacattgacataactga

SEQ ID NO: 28696 - RNA, 21 nt, synthetic construct
  source 1..21: mol_type = other RNA; note = Description of Artificial Sequence: Synthetic oligonucleotide
catgaaacattgacataactg

SEQ ID NO: 28697 - RNA, 21 nt, synthetic construct
  source 1..21: mol_type = other RNA; note = Description of Artificial Sequence: Synthetic oligonucleotide
ccatgaaacattgacataact

SEQ ID NO: 28698 - RNA, 21 nt, synthetic construct
  source 1..21: mol_type = other RNA; note = Description of Artificial Sequence: Synthetic oligonucleotide
accatgaaacattgacataac

SEQ ID NO: 28699 - RNA, 21 nt, synthetic construct
  source 1..21: mol_type = other RNA; note = Description of Artificial Sequence: Synthetic oligonucleotide
gaccatgaaacattgacataa

SEQ ID NO: 28700 - RNA, 21 nt, synthetic construct
  source 1..21: mol_type = other RNA; note = Description of Artificial Sequence: Synthetic oligonucleotide
tgaccatgaaacattgacata

SEQ ID NO: 28701 - RNA, 21 nt, synthetic construct
  source 1..21: mol_type = other RNA; note = Description of Artificial Sequence: Synthetic oligonucleotide
ttgaccatgaaacattgacat

SEQ ID NO: 28702 - RNA, 21 nt, synthetic construct
  source 1..21: mol_type = other RNA; note = Description of Artificial Sequence: Synthetic oligonucleotide
attgaccatgaaacattgaca

SEQ ID NO: 28703 - RNA, 21 nt, synthetic construct
  source 1..21: mol_type = other RNA; note = Description of Artificial Sequence: Synthetic oligonucleotide
tattgaccatgaaacattgac

SEQ ID NO: 28704 - RNA, 21 nt, synthetic construct
  source 1..21: mol_type = other RNA; note = Description of Artificial Sequence: Synthetic oligonucleotide
ttattgaccatgaaacattga

SEQ ID NO: 28705 - RNA, 21 nt, synthetic construct
  source 1..21: mol_type = other RNA; note = Description of Artificial Sequence: Synthetic oligonucleotide
tttattgaccatgaaacattg

SEQ ID NO: 28706 - RNA, 21 nt, synthetic construct
  source 1..21: mol_type = other RNA; note = Description of Artificial Sequence: Synthetic oligonucleotide
ttttattgaccatgaaacatt

SEQ ID NO: 28707 - RNA, 21 nt, synthetic construct
  source 1..21: mol_type = other RNA; note = Description of Artificial Sequence: Synthetic oligonucleotide
tttttattgaccatgaaacat

SEQ ID NO: 28708 - RNA, 21 nt, synthetic construct
  source 1..21: mol_type = other RNA; note = Description of Artificial Sequence: Synthetic oligonucleotide
ctttttattgaccatgaaaca

SEQ ID NO: 28709 - RNA, 21 nt, synthetic construct
  source 1..21: mol_type = other RNA; note = Description of Artificial Sequence: Synthetic oligonucleotide
cctttttattgaccatgaaac

SEQ ID NO: 28710 - RNA, 21 nt, synthetic construct
  source 1..21: mol_type = other RNA; note = Description of Artificial Sequence: Synthetic oligonucleotide
tcctttttattgaccatgaaa

SEQ ID NO: 28711 - RNA, 21 nt, synthetic construct
  source 1..21: mol_type = other RNA; note = Description of Artificial Sequence: Synthetic oligonucleotide
ttcctttttattgaccatgaa

SEQ ID NO: 28712 - RNA, 21 nt, synthetic construct
  source 1..21: mol_type = other RNA; note = Description of Artificial Sequence: Synthetic oligonucleotide
cttcctttttattgaccatga

SEQ ID NO: 28713 - RNA, 21 nt, synthetic construct
  source 1..21: mol_type = other RNA; note = Description of Artificial Sequence: Synthetic oligonucleotide
acttcctttttattgaccatg

SEQ ID NO: 28714 - RNA, 21 nt, synthetic construct
  source 1..21: mol_type = other RNA; note = Description of Artificial Sequence: Synthetic oligonucleotide
aacttcctttttattgaccat

SEQ ID NO: 28715 - RNA, 21 nt, synthetic construct
  source 1..21: mol_type = other RNA; note = Description of Artificial Sequence: Synthetic oligonucleotide
caacttcctttttattgacca

SEQ ID NO: 28716 - RNA, 21 nt, synthetic construct
  source 1..21: mol_type = other RNA; note = Description of Artificial Sequence: Synthetic oligonucleotide
gcaacttcctttttattgacc

SEQ ID NO: 28717 - RNA, 21 nt, synthetic construct
  source 1..21: mol_type = other RNA; note = Description of Artificial Sequence: Synthetic oligonucleotide
tgcaacttcctttttattgac

SEQ ID NO: 28718 - RNA, 21 nt, synthetic construct
  source 1..21: mol_type = other RNA; note = Description of Artificial Sequence: Synthetic oligonucleotide
ttgcaacttcctttttattga

SEQ ID NO: 28719 - RNA, 21 nt, synthetic construct
  source 1..21: mol_type = other RNA; note = Description of Artificial Sequence: Synthetic oligonucleotide
tttgcaacttcctttttattg

SEQ ID NO: 28720 - RNA, 21 nt, synthetic construct
  source 1..21: mol_type = other RNA; note = Description of Artificial Sequence: Synthetic oligonucleotide
atttgcaacttcctttttatt

SEQ ID NO: 28721 - RNA, 21 nt, synthetic construct
  source 1..21: mol_type = other RNA; note = Description of Artificial Sequence: Synthetic oligonucleotide
aatttgcaacttcctttttat

SEQ ID NO: 28722 - RNA, 21 nt, synthetic construct
  source 1..21: mol_type = other RNA; note = Description of Artificial Sequence: Synthetic oligonucleotide
caatttgcaacttccttttta

SEQ ID NO: 28723 - RNA, 21 nt, synthetic construct
  source 1..21: mol_type = other RNA; note = Description of Artificial Sequence: Synthetic oligonucleotide
acaatttgcaacttccttttt

SEQ ID NO: 28724 - RNA, 21 nt, synthetic construct
  source 1..21: mol_type = other RNA; note = Description of Artificial Sequence: Synthetic oligonucleotide
cacaatttgcaacttcctttt

SEQ ID NO: 28725 - RNA, 21 nt, synthetic construct
  source 1..21: mol_type = other RNA; note = Description of Artificial Sequence: Synthetic oligonucleotide
tcacaatttgcaacttccttt

SEQ ID NO: 28726 - RNA, 21 nt, synthetic construct
  source 1..21: mol_type = other RNA; note = Description of Artificial Sequence: Synthetic oligonucleotide
gcaggggcgtggcgagggttt

SEQ ID NO: 28727 - RNA, 21 nt, synthetic construct
  source 1..21: mol_type = other RNA; note = Description of Artificial Sequence: Synthetic oligonucleotide
agcaggggcgtggcgagggtt

SEQ ID NO: 28728 - RNA, 21 nt, synthetic construct
  source 1..21: mol_type = other RNA; note = Description of Artificial Sequence: Synthetic oligonucleotide
gagcaggggcgtggcgagggt

SEQ ID NO: 28729 - RNA, 21 nt, synthetic construct
  source 1..21: mol_type = other RNA; note = Description of Artificial Sequence: Synthetic oligonucleotide
ggagcaggggcgtggcgaggg

SEQ ID NO: 28730 - RNA, 21 nt, synthetic construct
  source 1..21: mol_type = other RNA; note = Description of Artificial Sequence: Synthetic oligonucleotide
gggagcaggggcgtggcgagg

SEQ ID NO: 28731 - RNA, 21 nt, synthetic construct
  source 1..21: mol_type = other RNA; note = Description of Artificial Sequence: Synthetic oligonucleotide
ggggagcaggggcgtggcgag

SEQ ID NO: 28732 - RNA, 21 nt, synthetic construct
  source 1..21: mol_type = other RNA; note = Description of Artificial Sequence: Synthetic oligonucleotide
gggggagcaggggcgtggcga

SEQ ID NO: 28733 - RNA, 21 nt, synthetic construct
  source 1..21: mol_type = other RNA; note = Description of Artificial Sequence: Synthetic oligonucleotide
cgggggagcaggggcgtggcg

SEQ ID NO: 28734 - RNA, 21 nt, synthetic construct
  source 1..21: mol_type = other RNA; note = Description of Artificial Sequence: Synthetic oligonucleotide
gcgggggagcaggggcgtggc

SEQ ID NO: 28735 - RNA, 21 nt, synthetic construct
  source 1..21: mol_type = other RNA; note = Description of Artificial Sequence: Synthetic oligonucleotide
cgcgggggagcaggggcgtgg

SEQ ID NO: 28736 - RNA, 21 nt, synthetic construct
  source 1..21: mol_type = other RNA; note = Description of Artificial Sequence: Synthetic oligonucleotide
ccgcgggggagcaggggcgtg

SEQ ID NO: 28737 - RNA, 21 nt, synthetic construct
  source 1..21: mol_type = other RNA; note = Description of Artificial Sequence: Synthetic oligonucleotide
accgcgggggagcaggggcgt

SEQ ID NO: 28738 - RNA, 21 nt, synthetic construct
  source 1..21: mol_type = other RNA; note = Description of Artificial Sequence: Synthetic oligonucleotide
aaccgcgggggagcaggggcg

SEQ ID NO: 28739 - RNA, 21 nt, synthetic construct
  source 1..21: mol_type = other RNA; note = Description of Artificial Sequence: Synthetic oligonucleotide
caaccgcgggggagcaggggc

SEQ ID NO: 28740 - RNA, 21 nt, synthetic construct
  source 1..21: mol_type = other RNA; note = Description of Artificial Sequence: Synthetic oligonucleotide
ccaaccgcgggggagcagggg

SEQ ID NO: 28741 - RNA, 21 nt, synthetic construct
  source 1..21: mol_type = other RNA; note = Description of Artificial Sequence: Synthetic oligonucleotide
accaaccgcgggggagcaggg

SEQ ID NO: 28742 - RNA, 21 nt, synthetic construct
  source 1..21: mol_type = other RNA; note = Description of Artificial Sequence: Synthetic oligonucleotide
aaccaaccgcgggggagcagg

SEQ ID NO: 28743 - RNA, 21 nt, synthetic construct
  source 1..21: mol_type = other RNA; note = Description of Artificial Sequence: Synthetic oligonucleotide
gaaccaaccgcgggggagcag

SEQ ID NO: 28744 - RNA, 21 nt, synthetic construct
  source 1..21: mol_type = other RNA; note = Description of Artificial Sequence: Synthetic oligonucleotide
agaaccaaccgcgggggagca

SEQ ID NO: 28745 - RNA, 21 nt, synthetic construct
  source 1..21: mol_type = other RNA; note = Description of Artificial Sequence: Synthetic oligonucleotide
aagaaccaaccgcgggggagc

SEQ ID NO: 28746 - RNA, 21 nt, synthetic construct
  source 1..21: mol_type = other RNA; note = Description of Artificial Sequence: Synthetic oligonucleotide
gaagaaccaaccgcgggggag

SEQ ID NO: 28747 - RNA, 21 nt, synthetic construct
  source 1..21: mol_type = other RNA; note = Description of Artificial Sequence: Synthetic oligonucleotide
ggaagaaccaaccgcggggga

SEQ ID NO: 28748 - RNA, 21 nt, synthetic construct
  source 1..21: mol_type = other RNA; note = Description of Artificial Sequence: Synthetic oligonucleotide
aggaagaaccaaccgcggggg

SEQ ID NO: 28749 - RNA, 21 nt, synthetic construct
  source 1..21: mol_type = other RNA; note = Description of Artificial Sequence: Synthetic oligonucleotide
aaggaagaaccaaccgcgggg

SEQ ID NO: 28750 - RNA, 21 nt, synthetic construct
  source 1..21: mol_type = other RNA; note = Description of Artificial Sequence: Synthetic oligonucleotide
caaggaagaaccaaccgcggg

SEQ ID NO: 28751 - RNA, 21 nt, synthetic construct
  source 1..21: mol_type = other RNA; note = Description of Artificial Sequence: Synthetic oligonucleotide
gcaaggaagaaccaaccgcgg

SEQ ID NO: 28752 - RNA, 21 nt, synthetic construct
  source 1..21: mol_type = other RNA; note = Description of Artificial Sequence: Synthetic oligonucleotide
agcaaggaagaaccaaccgcg

SEQ ID NO: 28753 - RNA, 21 nt, synthetic construct
  source 1..21: mol_type = other RNA; note = Description of Artificial Sequence: Synthetic oligonucleotide
gagcaaggaagaaccaaccgc

SEQ ID NO: 28754 - RNA, 21 nt, synthetic construct
  source 1..21: mol_type = other RNA; note = Description of Artificial Sequence: Synthetic oligonucleotide
agagcaaggaagaaccaaccg

SEQ ID NO: 28755 - RNA, 21 nt, synthetic construct
  source 1..21: mol_type = other RNA; note = Description of Artificial Sequence: Synthetic oligonucleotide
tagagcaaggaagaaccaacc

SEQ ID NO: 28756 - RNA, 21 nt, synthetic construct
  source 1..21: mol_type = other RNA; note = Description of Artificial Sequence: Synthetic oligonucleotide
gtagagcaaggaagaaccaac

SEQ ID NO: 28757 - RNA, 21 nt, synthetic construct
  source 1..21: mol_type = other RNA; note = Description of Artificial Sequence: Synthetic oligonucleotide
agtagagcaaggaagaaccaa

SEQ ID NO: 28758 - RNA, 21 nt, synthetic construct
  source 1..21: mol_type = other RNA; note = Description of Artificial Sequence: Synthetic oligonucleotide
gagtagagcaaggaagaacca

SEQ ID NO: 28759 - RNA, 21 nt, synthetic construct
  source 1..21: mol_type = other RNA; note = Description of Artificial Sequence: Synthetic oligonucleotide
tgagtagagcaaggaagaacc

SEQ ID NO: 28760 - RNA, 21 nt, synthetic construct
  source 1..21: mol_type = other RNA; note = Description of Artificial Sequence: Synthetic oligonucleotide
ttgagtagagcaaggaagaac

SEQ ID NO: 28761 - RNA, 21 nt, synthetic construct
  source 1..21: mol_type = other RNA; note = Description of Artificial Sequence: Synthetic oligonucleotide
gttgagtagagcaaggaagaa

SEQ ID NO: 28762 - RNA, 21 nt, synthetic construct
  source 1..21: mol_type = other RNA; note = Description of Artificial Sequence: Synthetic oligonucleotide
ggttgagtagagcaaggaaga

SEQ ID NO: 28763 - RNA, 21 nt, synthetic construct
  source 1..21: mol_type = other RNA; note = Description of Artificial Sequence: Synthetic oligonucleotide
gggttgagtagagcaaggaag

SEQ ID NO: 28764 - RNA, 21 nt, synthetic construct
  source 1..21: mol_type = other RNA; note = Description of Artificial Sequence: Synthetic oligonucleotide
agggttgagtagagcaaggaa

SEQ ID NO: 28765 - RNA, 21 nt, synthetic construct
  source 1..21: mol_type = other RNA; note = Description of Artificial Sequence: Synthetic oligonucleotide
cagggttgagtagagcaagga

SEQ ID NO: 28766 - RNA, 21 nt, synthetic construct
  source 1..21: mol_type = other RNA; note = Description of Artificial Sequence: Synthetic oligonucleotide
tcagggttgagtagagcaagg

SEQ ID NO: 28767 - RNA, 21 nt, synthetic construct
  source 1..21: mol_type = other RNA; note = Description of Artificial Sequence: Synthetic oligonucleotide
gtcagggttgagtagagcaag

SEQ ID NO: 28768 - RNA, 21 nt, synthetic construct
  source 1..21: mol_type = other RNA; note = Description of Artificial Sequence: Synthetic oligonucleotide
ggtcagggttgagtagagcaa

SEQ ID NO: 28769 - RNA, 21 nt, synthetic construct
  source 1..21: mol_type = other RNA; note = Description of Artificial Sequence: Synthetic oligonucleotide
aggtcagggttgagtagagca

SEQ ID NO: 28770 - RNA, 21 nt, synthetic construct
  source 1..21: mol_type = other RNA; note = Description of Artificial Sequence: Synthetic oligonucleotide
gaggtcagggttgagtagagc

SEQ ID NO: 28771 - RNA, 21 nt, synthetic construct
  source 1..21: mol_type = other RNA; note = Description of Artificial Sequence: Synthetic oligonucleotide
agaggtcagggttgagtagag

SEQ ID NO: 28772 - RNA, 21 nt, synthetic construct
  source 1..21: mol_type = other RNA; note = Description of Artificial Sequence: Synthetic oligonucleotide
aagaggtcagggttgagtaga

SEQ ID NO: 28773 - RNA, 21 nt, synthetic construct
  source 1..21: mol_type = other RNA; note = Description of Artificial Sequence: Synthetic oligonucleotide
gaagaggtcagggttgagtag

SEQ ID NO: 28774 - RNA, 21 nt, synthetic construct
  source 1..21: mol_type = other RNA; note = Description of Artificial Sequence: Synthetic oligonucleotide
agaagaggtcagggttgagta

SEQ ID NO: 28775 - RNA, 21 nt, synthetic construct
  source 1..21: mol_type = other RNA; note = Description of Artificial Sequence: Synthetic oligonucleotide
gagaagaggtcagggttgagt

SEQ ID NO: 28776 - RNA, 21 nt, synthetic construct
  source 1..21: mol_type = other RNA; note = Description of Artificial Sequence: Synthetic oligonucleotide
agagaagaggtcagggttgag

SEQ ID NO: 28777 - RNA, 21 nt, synthetic construct
  source 1..21: mol_type = other RNA; note = Description of Artificial Sequence: Synthetic oligonucleotide
gagagaagaggtcagggttga

SEQ ID NO: 28778 - RNA, 21 nt, synthetic construct
  source 1..21: mol_type = other RNA; note = Description of Artificial Sequence: Synthetic oligonucleotide
agagagaagaggtcagggttg

SEQ ID NO: 28779 - RNA, 21 nt, synthetic construct
  source 1..21: mol_type = other RNA; note = Description of Artificial Sequence: Synthetic oligonucleotide
cagagagaagaggtcagggtt

SEQ ID NO: 28780 - RNA, 21 nt, synthetic construct
  source 1..21: mol_type = other RNA; note = Description of Artificial Sequence: Synthetic oligonucleotide
tcagagagaagaggtcagggt

SEQ ID NO: 28781 - RNA, 21 nt, synthetic construct
  source 1..21: mol_type = other RNA; note = Description of Artificial Sequence: Synthetic oligonucleotide
gtcagagagaagaggtcaggg

SEQ ID NO: 28782 - RNA, 21 nt, synthetic construct
  source 1..21: mol_type = other RNA; note = Description of Artificial Sequence: Synthetic oligonucleotide
agtcagagagaagaggtcagg

SEQ ID NO: 28783 - RNA, 21 nt, synthetic construct
  source 1..21: mol_type = other RNA; note = Description of Artificial Sequence: Synthetic oligonucleotide
gagtcagagagaagaggtcag

SEQ ID NO: 28784 - RNA, 21 nt, synthetic construct
  source 1..21: mol_type = other RNA; note = Description of Artificial Sequence: Synthetic oligonucleotide
agagtcagagagaagaggtca

SEQ ID NO: 28785 - RNA, 21 nt, synthetic construct
  source 1..21: mol_type = other RNA; note = Description of Artificial Sequence: Synthetic oligonucleotide
gagagtcagagagaagaggtc

SEQ ID NO: 28786 - RNA, 21 nt, synthetic construct
  source 1..21: mol_type = other RNA; note = Description of Artificial Sequence: Synthetic oligonucleotide
cgagagtcagagagaagaggt

SEQ ID NO: 28787 - RNA, 21 nt, synthetic construct
  source 1..21: mol_type = other RNA; note = Description of Artificial Sequence: Synthetic oligonucleotide
tcgagagtcagagagaagagg

SEQ ID NO: 28788 - RNA, 21 nt, synthetic construct
  source 1..21: mol_type = other RNA; note = Description of Artificial Sequence: Synthetic oligonucleotide
gtcgagagtcagagagaagag

SEQ ID NO: 28789 - RNA, 21 nt, synthetic construct
  source 1..21: mol_type = other RNA; note = Description of Artificial Sequence: Synthetic oligonucleotide
agtcgagagtcagagagaaga

SEQ ID NO: 28790 - RNA, 21 nt, synthetic construct
  source 1..21: mol_type = other RNA; note = Description of Artificial Sequence: Synthetic oligonucleotide
aagtcgagagtcagagagaag

SEQ ID NO: 28791 - RNA, 21 nt, synthetic construct
  source 1..21: mol_type = other RNA; note = Description of Artificial Sequence: Synthetic oligonucleotide
caagtcgagagtcagagagaa

SEQ ID NO: 28792 - RNA, 21 nt, synthetic construct
  source 1..21: mol_type = other RNA; note = Description of Artificial Sequence: Synthetic oligonucleotide
acaagtcgagagtcagagaga

SEQ ID NO: 28793 - RNA, 21 nt, synthetic construct
  source 1..21: mol_type = other RNA; note = Description of Artificial Sequence: Synthetic oligonucleotide
cacaagtcgagagtcagagag

SEQ ID NO: 28794 - RNA, 21 nt, synthetic construct
  source 1..21: mol_type = other RNA; note = Description of Artificial Sequence: Synthetic oligonucleotide
acacaagtcgagagtcagaga

SEQ ID NO: 28795 - RNA, 21 nt, synthetic construct
  source 1..21: mol_type = other RNA; note = Description of Artificial Sequence: Synthetic oligonucleotide
aacacaagtcgagagtcagag

SEQ ID NO: 28796 - RNA, 21 nt, synthetic construct
  source 1..21: mol_type = other RNA; note = Description of Artificial Sequence: Synthetic oligonucleotide
gaacacaagtcgagagtcaga

SEQ ID NO: 28797 - RNA, 21 nt, synthetic construct
  source 1..21: mol_type = other RNA; note = Description of Artificial Sequence: Synthetic oligonucleotide
ggaacacaagtcgagagtcag

SEQ ID NO: 28798 - RNA, 21 nt, synthetic construct
  source 1..21: mol_type = other RNA; note = Description of Artificial Sequence: Synthetic oligonucleotide
gggaacacaagtcgagagtca

SEQ ID NO: 28799 - RNA, 21 nt, synthetic construct
  source 1..21: mol_type = other RNA; note = Description of Artificial Sequence: Synthetic oligonucleotide
ggggaacacaagtcgagagtc

SEQ ID NO: 28800 - RNA, 21 nt, synthetic construct
  source 1..21: mol_type = other RNA; note = Description of Artificial Sequence: Synthetic oligonucleotide
cggggaacacaagtcgagagt

SEQ ID NO: 28801 - RNA, 21 nt, synthetic construct
  source 1..21: mol_type = other RNA; note = Description of Artificial Sequence: Synthetic oligonucleotide
gcggggaacacaagtcgagag

SEQ ID NO: 28802 - RNA, 21 nt, synthetic construct
  source 1..21: mol_type = other RNA; note = Description of Artificial Sequence: Synthetic oligonucleotide
agcggggaacacaagtcgaga

SEQ ID NO: 28803 - RNA, 21 nt, synthetic construct
  source 1..21: mol_type = other RNA; note = Description of Artificial Sequence: Synthetic oligonucleotide
gagcggggaacacaagtcgag

SEQ ID NO: 28804 - RNA, 21 nt, synthetic construct
  source 1..21: mol_type = other RNA; note = Description of Artificial Sequence: Synthetic oligonucleotide
ggagcggggaacacaagtcga

SEQ ID NO: 28805 - RNA, 21 nt, synthetic construct
  source 1..21: mol_type = other RNA; note = Description of Artificial Sequence: Synthetic oligonucleotide
aggagcggggaacacaagtcg

SEQ ID NO: 28806 - RNA, 21 nt, synthetic construct
  source 1..21: mol_type = other RNA; note = Description of Artificial Sequence: Synthetic oligonucleotide
gaggagcggggaacacaagtc

SEQ ID NO: 28807 - RNA, 21 nt, synthetic construct
  source 1..21: mol_type = other RNA; note = Description of Artificial Sequence: Synthetic oligonucleotide
ggaggagcggggaacacaagt

SEQ ID NO: 28808 - RNA, 21 nt, synthetic construct
  source 1..21: mol_type = other RNA; note = Description of Artificial Sequence: Synthetic oligonucleotide
gggaggagcggggaacacaag

SEQ ID NO: 28809 - RNA, 21 nt, synthetic construct
  source 1..21: mol_type = other RNA; note = Description of Artificial Sequence: Synthetic oligonucleotide
agggaggagcggggaacacaa

SEQ ID NO: 28810 - RNA, 21 nt, synthetic construct
  source 1..21: mol_type = other RNA; note = Description of Artificial Sequence: Synthetic oligonucleotide
cagggaggagcggggaacaca

SEQ ID NO: 28811 - RNA, 21 nt, synthetic construct
  source 1..21: mol_type = other RNA; note = Description of Artificial Sequence: Synthetic oligonucleotide
tcagggaggagcggggaacac

SEQ ID NO: 28812 - RNA, 21 nt, synthetic construct
  source 1..21: mol_type = other RNA; note = Description of Artificial Sequence: Synthetic oligonucleotide
gtcagggaggagcggggaaca

SEQ ID NO: 28813 - RNA, 21 nt, synthetic construct
  source 1..21: mol_type = other RNA; note = Description of Artificial Sequence: Synthetic oligonucleotide
ggtcagggaggagcggggaac

SEQ ID NO: 28814 - RNA, 21 nt, synthetic construct
  source 1..21: mol_type = other RNA; note = Description of Artificial Sequence: Synthetic oligonucleotide
aggtcagggaggagcggggaa

SEQ ID NO: 28815 - RNA, 21 nt, synthetic construct
  source 1..21: mol_type = other RNA; note = Description of Artificial Sequence: Synthetic oligonucleotide
aaggtcagggaggagcgggga

SEQ ID NO: 28816 - RNA, 21 nt, synthetic construct
  source 1..21: mol_type = other RNA; note = Description of Artificial Sequence: Synthetic oligonucleotide
gaaggtcagggaggagcgggg

SEQ ID NO: 28817 - RNA, 21 nt, synthetic construct
  source 1..21: mol_type = other RNA; note = Description of Artificial Sequence: Synthetic oligonucleotide
ggaaggtcagggaggagcggg

SEQ ID NO: 28818 - RNA, 21 nt, synthetic construct
  source 1..21: mol_type = other RNA; note = Description of Artificial Sequence: Synthetic oligonucleotide
aggaaggtcagggaggagcgg

SEQ ID NO: 28819 - RNA, 21 nt, synthetic construct
  source 1..21: mol_type = other RNA; note = Description of Artificial Sequence: Synthetic oligonucleotide
gaggaaggtcagggaggagcg

SEQ ID NO: 28820 - RNA, 21 nt, synthetic construct
  source 1..21: mol_type = other RNA; note = Description of Artificial Sequence: Synthetic oligonucleotide
ggaggaaggtcagggaggagc

SEQ ID NO: 28821 - RNA, 21 nt, synthetic construct
  source 1..21: mol_type = other RNA; note = Description of Artificial Sequence: Synthetic oligonucleotide
gggaggaaggtcagggaggag

SEQ ID NO: 28822 - RNA, 21 nt, synthetic construct
  source 1..21: mol_type = other RNA; note = Description of Artificial Sequence: Synthetic oligonucleotide
ggggaggaaggtcagggagga

SEQ ID NO: 28823 - RNA, 21 nt, synthetic construct
  source 1..21: mol_type = other RNA; note = Description of Artificial Sequence: Synthetic oligonucleotide
aggggaggaaggtcagggagg

SEQ ID NO: 28824 - RNA, 21 nt, synthetic construct
  source 1..21: mol_type = other RNA; note = Description of Artificial Sequence: Synthetic oligonucleotide
gaggggaggaaggtcagggag

SEQ ID NO: 28825 - RNA, 21 nt, synthetic construct
  source 1..21: mol_type = other RNA; note = Description of Artificial Sequence: Synthetic oligonucleotide
ggaggggaggaaggtcaggga

SEQ ID NO: 28826 - RNA, 21 nt, synthetic construct
  source 1..21: mol_type = other RNA; note = Description of Artificial Sequence: Synthetic oligonucleotide
gggaggggaggaaggtcaggg

SEQ ID NO: 28827 - RNA, 21 nt, synthetic construct
  source 1..21: mol_type = other RNA; note = Description of Artificial Sequence: Synthetic oligonucleotide
ggggaggggaggaaggtcagg

SEQ ID NO: 28828 - RNA, 21 nt, synthetic construct
  source 1..21: mol_type = other RNA; note = Description of Artificial Sequence: Synthetic oligonucleotide
aggggaggggaggaaggtcag

SEQ ID NO: 28829 - RNA, 21 nt, synthetic construct
  source 1..21: mol_type = other RNA; note = Description of Artificial Sequence: Synthetic oligonucleotide
aaggggaggggaggaaggtca

SEQ ID NO: 28830 - RNA, 21 nt, synthetic construct
  source 1..21: mol_type = other RNA; note = Description of Artificial Sequence: Synthetic oligonucleotide
aaaggggaggggaggaaggtc

SEQ ID NO: 28831 - RNA, 21 nt, synthetic construct
  source 1..21: mol_type = other RNA; note = Description of Artificial Sequence: Synthetic oligonucleotide
gaaaggggaggggaggaaggt

SEQ ID NO: 28832 - RNA, 21 nt, synthetic construct
  source 1..21: mol_type = other RNA; note = Description of Artificial Sequence: Synthetic oligonucleotide
tgaaaggggaggggaggaagg

SEQ ID NO: 28833 - RNA, 21 nt, synthetic construct
  source 1..21: mol_type = other RNA; note = Description of Artificial Sequence: Synthetic oligonucleotide
gtgaaaggggaggggaggaag

SEQ ID NO: 28834 - RNA, 21 nt, synthetic construct
  source 1..21: mol_type = other RNA; note = Description of Artificial Sequence: Synthetic oligonucleotide
agtgaaaggggaggggaggaa

SEQ ID NO: 28835 - RNA, 21 nt, synthetic construct
  source 1..21: mol_type = other RNA; note = Description of Artificial Sequence: Synthetic oligonucleotide
gagtgaaaggggaggggagga

SEQ ID NO: 28836 - RNA, 21 nt, synthetic construct
  source 1..21: mol_type = other RNA; note = Description of Artificial Sequence: Synthetic oligonucleotide
tgagtgaaaggggaggggagg

SEQ ID NO: 28837 - RNA, 21 nt, synthetic construct
  source 1..21: mol_type = other RNA; note = Description of Artificial Sequence: Synthetic oligonucleotide
ttgagtgaaaggggaggggag

SEQ ID NO: 28838 - RNA, 21 nt, synthetic construct
  source 1..21: mol_type = other RNA; note = Description of Artificial Sequence: Synthetic oligonucleotide
attgagtgaaaggggagggga

SEQ ID NO: 28839 - RNA, 21 nt, synthetic construct
  source 1..21: mol_type = other RNA; note = Description of Artificial Sequence: Synthetic oligonucleotide
aattgagtgaaaggggagggg

SEQ ID NO: 28840 - RNA, 21 nt, synthetic construct
  source 1..21: mol_type = other RNA; note = Description of Artificial Sequence: Synthetic oligonucleotide
gaattgagtgaaaggggaggg

SEQ ID NO: 28841 - RNA, 21 nt, synthetic construct
  source 1..21: mol_type = other RNA; note = Description of Artificial Sequence: Synthetic oligonucleotide
agaattgagtgaaaggggagg

SEQ ID NO: 28842 - RNA, 21 nt, synthetic construct
  source 1..21: mol_type = other RNA; note = Description of Artificial Sequence: Synthetic oligonucleotide
gagaattgagtgaaaggggag

SEQ ID NO: 28843 - RNA, 21 nt, synthetic construct
  source 1..21: mol_type = other RNA; note = Description of Artificial Sequence: Synthetic oligonucleotide
tgagaattgagtgaaagggga

SEQ ID NO: 28844 - RNA, 21 nt, synthetic construct
  source 1..21: mol_type = other RNA; note = Description of Artificial Sequence: Synthetic oligonucleotide
gtgagaattgagtgaaagggg

SEQ ID NO: 28845 - RNA, 21 nt, synthetic construct
  source 1..21: mol_type = other RNA; note = Description of Artificial Sequence: Synthetic oligonucleotide
ggtgagaattgagtgaaaggg

SEQ ID NO: 28846 - RNA, 21 nt, synthetic construct
  source 1..21: mol_type = other RNA; note = Description of Artificial Sequence: Synthetic oligonucleotide
tggtgagaattgagtgaaagg

SEQ ID NO: 28847 - RNA, 21 nt, synthetic construct
  source 1..21: mol_type = other RNA; note = Description of Artificial Sequence: Synthetic oligonucleotide
ttggtgagaattgagtgaaag

SEQ ID NO: 28848 - RNA, 21 nt, synthetic construct
  source 1..21: mol_type = other RNA; note = Description of Artificial Sequence: Synthetic oligonucleotide
gttggtgagaattgagtgaaa

SEQ ID NO: 28849 - RNA, 21 nt, synthetic construct
  source 1..21: mol_type = other RNA; note = Description of Artificial Sequence: Synthetic oligonucleotide
agttggtgagaattgagtgaa

SEQ ID NO: 28850 - RNA, 21 nt, synthetic construct
  source 1..21: mol_type = other RNA; note = Description of Artificial Sequence: Synthetic oligonucleotide
gagttggtgagaattgagtga

SEQ ID NO: 28851 - RNA, 21 nt, synthetic construct
  source 1..21: mol_type = other RNA; note = Description of Artificial Sequence: Synthetic oligonucleotide
agagttggtgagaattgagtg

SEQ ID NO: 28852 - RNA, 21 nt, synthetic construct
  source 1..21: mol_type = other RNA; note = Description of Artificial Sequence: Synthetic oligonucleotide
aagagttggtgagaattgagt

SEQ ID NO: 28853 - RNA, 21 nt, synthetic construct
  source 1..21: mol_type = other RNA; note = Description of Artificial Sequence: Synthetic oligonucleotide
aaagagttggtgagaattgag

SEQ ID NO: 28854 - RNA, 21 nt, synthetic construct
  source 1..21: mol_type = other RNA; note = Description of Artificial Sequence: Synthetic oligonucleotide
gaaagagttggtgagaattga

SEQ ID NO: 28855 - RNA, 21 nt, synthetic construct
  source 1..21: mol_type = other RNA; note = Description of Artificial Sequence: Synthetic oligonucleotide
agaaagagttggtgagaattg

SEQ ID NO: 28856 - RNA, 21 nt, synthetic construct
  source 1..21: mol_type = other RNA; note = Description of Artificial Sequence: Synthetic oligonucleotide
gagaaagagttggtgagaatt

SEQ ID NO: 28857 - RNA, 21 nt, synthetic construct
  source 1..21: mol_type = other RNA; note = Description of Artificial Sequence: Synthetic oligonucleotide
agagaaagagttggtgagaat

SEQ ID NO: 28858 - RNA, 21 nt, synthetic construct
  source 1..21: mol_type = other RNA; note = Description of Artificial Sequence: Synthetic oligonucleotide
gagagaaagagttggtgagaa

SEQ ID NO: 28859 - RNA, 21 nt, synthetic construct
  source 1..21: mol_type = other RNA; note = Description of Artificial Sequence: Synthetic oligonucleotide
agagagaaagagttggtgaga

SEQ ID NO: 28860 - RNA, 21 nt, synthetic construct
  source 1..21: mol_type = other RNA; note = Description of Artificial Sequence: Synthetic oligonucleotide
gagagagaaagagttggtgag

SEQ ID NO: 28861 - RNA, 21 nt, synthetic construct
  source 1..21: mol_type = other RNA; note = Description of Artificial Sequence: Synthetic oligonucleotide
agagagagaaagagttggtga

SEQ ID NO: 28862 - RNA, 21 nt, synthetic construct
  source 1..21: mol_type = other RNA; note = Description of Artificial Sequence: Synthetic oligonucleotide
cagagagagaaagagttggtg

SEQ ID NO: 28863 - RNA, 21 nt, synthetic construct
  source 1..21: mol_type = other RNA; note = Description of Artificial Sequence: Synthetic oligonucleotide
ccagagagagaaagagttggt

SEQ ID NO: 28864 - RNA, 21 nt, synthetic construct
  source 1..21: mol_type = other RNA; note = Description of Artificial Sequence: Synthetic oligonucleotide
accagagagagaaagagttgg

SEQ ID NO: 28865 - RNA, 21 nt, synthetic construct
  source 1..21: mol_type = other RNA; note = Description of Artificial Sequence: Synthetic oligonucleotide
caccagagagagaaagagttg

SEQ ID NO: 28866 - RNA, 21 nt, synthetic construct
  source 1..21: mol_type = other RNA; note = Description of Artificial Sequence: Synthetic oligonucleotide
acaccagagagagaaagagtt

SEQ ID NO: 28867 - RNA, 21 nt, synthetic construct
  source 1..21: mol_type = other RNA; note = Description of Artificial Sequence: Synthetic oligonucleotide
aacaccagagagagaaagagt

SEQ ID NO: 28868 - RNA, 21 nt, synthetic construct
  source 1..21: mol_type = other RNA; note = Description of Artificial Sequence: Synthetic oligonucleotide
aaacaccagagagagaaagag

SEQ ID NO: 28869 - RNA, 21 nt, synthetic construct
  source 1..21: mol_type = other RNA; note = Description of Artificial Sequence: Synthetic oligonucleotide
aaaacaccagagagagaaaga

SEQ ID NO: 28870 - RNA, 21 nt, synthetic construct
  source 1..21: mol_type = other RNA; note = Description of Artificial Sequence: Synthetic oligonucleotide
gaaaacaccagagagagaaag

SEQ ID NO: 28871 - RNA, 21 nt, synthetic construct
  source 1..21: mol_type = other RNA; note = Description of Artificial Sequence: Synthetic oligonucleotide
agaaaacaccagagagagaaa

SEQ ID NO: 28872 - RNA, 21 nt, synthetic construct
  source 1..21: mol_type = other RNA; note = Description of Artificial Sequence: Synthetic oligonucleotide
gagaaaacaccagagagagaa

SEQ ID NO: 28873 - RNA, 21 nt, synthetic construct
  source 1..21: mol_type = other RNA; note = Description of Artificial Sequence: Synthetic oligonucleotide
ggagaaaacaccagagagaga

SEQ ID NO: 28874 - RNA, 21 nt, synthetic construct
  source 1..21: mol_type = other RNA; note = Description of Artificial Sequence: Synthetic oligonucleotide
aggagaaaacaccagagagag

SEQ ID NO: 28875 - RNA, 21 nt, synthetic construct
  source 1..21: mol_type = other RNA; note = Description of Artificial Sequence: Synthetic oligonucleotide
aaggagaaaacaccagagaga

SEQ ID NO: 28876 - RNA, 21 nt, synthetic construct
  source 1..21: mol_type = other RNA; note = Description of Artificial Sequence: Synthetic oligonucleotide
aaaggagaaaacaccagagag

SEQ ID NO: 28877 - RNA, 21 nt, synthetic construct
  source 1..21: mol_type = other RNA; note = Description of Artificial Sequence: Synthetic oligonucleotide
aaaaggagaaaacaccagaga

SEQ ID NO: 28878 - RNA, 21 nt, synthetic construct
  source 1..21: mol_type = other RNA; note = Description of Artificial Sequence: Synthetic oligonucleotide
gaaaaggagaaaacaccagag

SEQ ID NO: 28879 - RNA, 21 nt, synthetic construct
  source 1..21: mol_type = other RNA; note = Description of Artificial Sequence: Synthetic oligonucleotide
agaaaaggagaaaacaccaga

SEQ ID NO: 28880 - RNA, 21 nt, synthetic construct
  source 1..21: mol_type = other RNA; note = Description of Artificial Sequence: Synthetic oligonucleotide
gagaaaaggagaaaacaccag

SEQ ID NO: 28881 - RNA, 21 nt, synthetic construct
  source 1..21: mol_type = other RNA; note = Description of Artificial Sequence: Synthetic oligonucleotide
cgagaaaaggagaaaacacca

SEQ ID NO: 28882 - RNA, 21 nt, synthetic construct
  source 1..21: mol_type = other RNA; note = Description of Artificial Sequence: Synthetic oligonucleotide
acgagaaaaggagaaaacacc

SEQ ID NO: 28883 - RNA, 21 nt, synthetic construct
  source 1..21: mol_type = other RNA; note = Description of Artificial Sequence: Synthetic oligonucleotide
tacgagaaaaggagaaaacac

SEQ ID NO: 28884 - RNA, 21 nt, synthetic construct
  source 1..21: mol_type = other RNA; note = Description of Artificial Sequence: Synthetic oligonucleotide
ttacgagaaaaggagaaaaca

SEQ ID NO: 28885 - RNA, 21 nt, synthetic construct
  source 1..21: mol_type = other RNA; note = Description of Artificial Sequence: Synthetic oligonucleotide
tttacgagaaaaggagaaaac

SEQ ID NO: 28886 - RNA, 21 nt, synthetic construct
  source 1..21: mol_type = other RNA; note = Description of Artificial Sequence: Synthetic oligonucleotide
gtttacgagaaaaggagaaaa

SEQ ID NO: 28887 - RNA, 21 nt, synthetic construct
  source 1..21: mol_type = other RNA; note = Description of Artificial Sequence: Synthetic oligonucleotide
agtttacgagaaaaggagaaa

SEQ ID NO: 28888 - RNA, 21 nt, synthetic construct
  source 1..21: mol_type = other RNA; note = Description of Artificial Sequence: Synthetic oligonucleotide
aagtttacgagaaaaggagaa

SEQ ID NO: 28889 - RNA, 21 nt, synthetic construct
  source 1..21: mol_type = other RNA; note = Description of Artificial Sequence: Synthetic oligonucleotide
aaagtttacgagaaaaggaga

SEQ ID NO: 28890 - RNA, 21 nt, synthetic construct
  source 1..21: mol_type = other RNA; note = Description of Artificial Sequence: Synthetic oligonucleotide
caaagtttacgagaaaaggag

SEQ ID NO: 28891 - RNA, 21 nt, synthetic construct
  source 1..21: mol_type = other RNA; note = Description of Artificial Sequence: Synthetic oligonucleotide
gcaaagtttacgagaaaagga

SEQ ID NO: 28892 - RNA, 21 nt, synthetic construct
  source 1..21: mol_type = other RNA; note = Description of Artificial Sequence: Synthetic oligonucleotide
ggcaaagtttacgagaaaagg

SEQ ID NO: 28893 - RNA, 21 nt, synthetic construct
  source 1..21: mol_type = other RNA; note = Description of Artificial Sequence: Synthetic oligonucleotide
cggcaaagtttacgagaaaag

SEQ ID NO: 28894 - RNA, 21 nt, synthetic construct
  source 1..21: mol_type = other RNA; note = Description of Artificial Sequence: Synthetic oligonucleotide
gcggcaaagtttacgagaaaa

SEQ ID NO: 28895 - RNA, 21 nt, synthetic construct
  source 1..21: mol_type = other RNA; note = Description of Artificial Sequence: Synthetic oligonucleotide
ggcggcaaagtttacgagaaa

SEQ ID NO: 28896 - RNA, 21 nt, synthetic construct
  source 1..21: mol_type = other RNA; note = Description of Artificial Sequence: Synthetic oligonucleotide
aggcggcaaagtttacgagaa

SEQ ID NO: 28897 - RNA, 21 nt, synthetic construct
  source 1..21: mol_type = other RNA; note = Description of Artificial Sequence: Synthetic oligonucleotide
taggcggcaaagtttacgaga

SEQ ID NO: 28898 - RNA, 21 nt, synthetic construct
  source 1..21: mol_type = other RNA; note = Description of Artificial Sequence: Synthetic oligonucleotide
ataggcggcaaagtttacgag

SEQ ID NO: 28899 - RNA, 21 nt, synthetic construct
  source 1..21: mol_type = other RNA; note = Description of Artificial Sequence: Synthetic oligonucleotide
cataggcggcaaagtttacga

SEQ ID NO: 28900 - RNA, 21 nt, synthetic construct
  source 1..21: mol_type = other RNA; note = Description of Artificial Sequence: Synthetic oligonucleotide
tcataggcggcaaagtttacg

SEQ ID NO: 28901 - RNA, 21 nt, synthetic construct
  source 1..21: mol_type = other RNA; note = Description of Artificial Sequence: Synthetic oligonucleotide
ctcataggcggcaaagtttac

SEQ ID NO: 28902 - RNA, 21 nt, synthetic construct
  source 1..21: mol_type = other RNA; note = Description of Artificial Sequence: Synthetic oligonucleotide
gctcataggcggcaaagttta

SEQ ID NO: 28903 - RNA, 21 nt, synthetic construct
  source 1..21: mol_type = other RNA; note = Description of Artificial Sequence: Synthetic oligonucleotide
tgctcataggcggcaaagttt

SEQ ID NO: 28904 - RNA, 21 nt, synthetic construct
  source 1..21: mol_type = other RNA; note = Description of Artificial Sequence: Synthetic oligonucleotide
ctgctcataggcggcaaagtt

SEQ ID NO: 28905 - RNA, 21 nt, synthetic construct
  source 1..21: mol_type = other RNA; note = Description of Artificial Sequence: Synthetic oligonucleotide
gctgctcataggcggcaaagt

SEQ ID NO: 28906 - RNA, 21 nt, synthetic construct
  source 1..21: mol_type = other RNA; note = Description of Artificial Sequence: Synthetic oligonucleotide
ggctgctcataggcggcaaag

SEQ ID NO: 28907 - RNA, 21 nt, synthetic construct
  source 1..21: mol_type = other RNA; note = Description of Artificial Sequence: Synthetic oligonucleotide
tggctgctcataggcggcaaa

SEQ ID NO: 28908 - RNA, 21 nt, synthetic construct
  source 1..21: mol_type = other RNA; note = Description of Artificial Sequence: Synthetic oligonucleotide
gtggctgctcataggcggcaa

SEQ ID NO: 28909 - RNA, 21 nt, synthetic construct
  source 1..21: mol_type = other RNA; note = Description of Artificial Sequence: Synthetic oligonucleotide
tgtggctgctcataggcggca

SEQ ID NO: 28910 - RNA, 21 nt, synthetic construct
  source 1..21: mol_type = other RNA; note = Description of Artificial Sequence: Synthetic oligonucleotide
atgtggctgctcataggcggc

SEQ ID NO: 28911 - RNA, 21 nt, synthetic construct
  source 1..21: mol_type = other RNA; note = Description of Artificial Sequence: Synthetic oligonucleotide
aatgtggctgctcataggcgg

SEQ ID NO: 28912 - RNA, 21 nt, synthetic construct
  source 1..21: mol_type = other RNA; note = Description of Artificial Sequence: Synthetic oligonucleotide
caatgtggctgctcataggcg

SEQ ID NO: 28913 - RNA, 21 nt, synthetic construct
  source 1..21: mol_type = other RNA; note = Description of Artificial Sequence: Synthetic oligonucleotide
gcaatgtggctgctcataggc

SEQ ID NO: 28914 - RNA, 21 nt, synthetic construct
  source 1..21: mol_type = other RNA; note = Description of Artificial Sequence: Synthetic oligonucleotide
ggcaatgtggctgctcatagg

SEQ ID NO: 28915 - RNA, 21 nt, synthetic construct
  source 1..21: mol_type = other RNA; note = Description of Artificial Sequence: Synthetic oligonucleotide
aggcaatgtggctgctcatag

SEQ ID NO: 28916 - RNA, 21 nt, synthetic construct
  source 1..21: mol_type = other RNA; note = Description of Artificial Sequence: Synthetic oligonucleotide
aaggcaatgtggctgctcata

SEQ ID NO: 28917 - RNA, 21 nt, synthetic construct
  source 1..21: mol_type = other RNA; note = Description of Artificial Sequence: Synthetic oligonucleotide
taaggcaatgtggctgctcat

SEQ ID NO: 28918 - RNA, 21 nt, synthetic construct
  source 1..21: mol_type = other RNA; note = Description of Artificial Sequence: Synthetic oligonucleotide
gtaaggcaatgtggctgctca

SEQ ID NO: 28919 - RNA, 21 nt, synthetic construct
  source 1..21: mol_type = other RNA; note = Description of Artificial Sequence: Synthetic oligonucleotide
agtaaggcaatgtggctgctc

SEQ ID NO: 28920 - RNA, 21 nt, synthetic construct
  source 1..21: mol_type = other RNA; note = Description of Artificial Sequence: Synthetic oligonucleotide
cagtaaggcaatgtggctgct

SEQ ID NO: 28921 - RNA, 21 nt, synthetic construct
  source 1..21: mol_type = other RNA; note = Description of Artificial Sequence: Synthetic oligonucleotide
tcagtaaggcaatgtggctgc

SEQ ID NO: 28922 - RNA, 21 nt, synthetic construct
  source 1..21: mol_type = other RNA; note = Description of Artificial Sequence: Synthetic oligonucleotide
tagttggagtctccctgattt

SEQ ID NO: 28923 - RNA, 21 nt, synthetic construct
  source 1..21: mol_type = other RNA; note = Description of Artificial Sequence: Synthetic oligonucleotide
taagttggagtctccctgatt

SEQ ID NO: 28924 - RNA, 21 nt, synthetic construct
  source 1..21: mol_type = other RNA; note = Description of Artificial Sequence: Synthetic oligonucleotide
ttaagttggagtctccctgtt

SEQ ID NO: 28925 - RNA, 21 nt, synthetic construct
  source 1..21: mol_type = other RNA; note = Description of Artificial Sequence: Synthetic oligonucleotide
tttaagttggagtctcccttt

SEQ ID NO: 28926 - RNA, 21 nt, synthetic construct
  source 1..21: mol_type = other RNA; note = Description of Artificial Sequence: Synthetic oligonucleotide
tcttaagttggagtctccctt

SEQ ID NO: 28927 - RNA, 21 nt, synthetic construct
  source 1..21: mol_type = other RNA; note = Description of Artificial Sequence: Synthetic oligonucleotide
tccttaagttggagtctcctt

SEQ ID NO: 28928 - RNA, 21 nt, synthetic construct
  source 1..21: mol_type = other RNA; note = Description of Artificial Sequence: Synthetic oligonucleotide
tgccttaagttggagtctctt

SEQ ID NO: 28929 - RNA, 21 nt, synthetic construct
  source 1..21: mol_type = other RNA; note = Description of Artificial Sequence: Synthetic oligonucleotide
ttgccttaagttggagtcttt

SEQ ID NO: 28930 - RNA, 21 nt, synthetic construct
  source 1..21: mol_type = other RNA; note = Description of Artificial Sequence: Synthetic oligonucleotide
tttgccttaagttggagtctt

SEQ ID NO: 28931 - RNA, 21 nt, synthetic construct
  source 1..21: mol_type = other RNA; note = Description of Artificial Sequence: Synthetic oligonucleotide
tgttgccttaagttggagttt

SEQ ID NO: 28932 - RNA, 21 nt, synthetic construct
  source 1..21: mol_type = other RNA; note = Description of Artificial Sequence: Synthetic oligonucleotide
ttgttgccttaagttggagtt

SEQ ID NO: 28933 - RNA, 21 nt, synthetic construct
  source 1..21: mol_type = other RNA; note = Description of Artificial Sequence: Synthetic oligonucleotide
tctgttgccttaagttggatt

SEQ ID NO: 28934 - RNA, 21 nt, synthetic construct
  source 1..21: mol_type = other RNA; note = Description of Artificial Sequence: Synthetic oligonucleotide
tgctgttgccttaagttggtt

SEQ ID NO: 28935 - RNA, 21 nt, synthetic construct
  source 1..21: mol_type = other RNA; note = Description of Artificial Sequence: Synthetic oligonucleotide
ttgctgttgccttaagttgtt

SEQ ID NO: 28936 - RNA, 21 nt, synthetic construct
  source 1..21: mol_type = other RNA; note = Description of Artificial Sequence: Synthetic oligonucleotide
tatgctgttgccttaagtttt

SEQ ID NO: 28937 - RNA, 21 nt, synthetic construct
  source 1..21: mol_type = other RNA; note = Description of Artificial Sequence: Synthetic oligonucleotide
tcatgctgttgccttaagttt

SEQ ID NO: 28938 - RNA, 21 nt, synthetic construct
  source 1..21: mol_type = other RNA; note = Description of Artificial Sequence: Synthetic oligonucleotide
tccatgctgttgccttaagtt

SEQ ID NO: 28939 - RNA, 21 nt, synthetic construct
  source 1..21: mol_type = other RNA; note = Description of Artificial Sequence: Synthetic oligonucleotide
tcccatgctgttgccttaatt

SEQ ID NO: 28940 - RNA, 21 nt, synthetic construct
  source 1..21: mol_type = other RNA; note = Description of Artificial Sequence: Synthetic oligonucleotide
tacccatgctgttgccttatt

SEQ ID NO: 28941 - RNA, 21 nt, synthetic construct
  source 1..21: mol_type = other RNA; note = Description of Artificial Sequence: Synthetic oligonucleotide
tcacccatgctgttgcctttt

SEQ ID NO: 28942 - RNA, 21 nt, synthetic construct
  source 1..21: mol_type = other RNA; note = Description of Artificial Sequence: Synthetic oligonucleotide
ttcacccatgctgttgccttt

SEQ ID NO: 28943 - RNA, 21 nt, synthetic construct
  source 1..21: mol_type = other RNA; note = Description of Artificial Sequence: Synthetic oligonucleotide
tttcacccatgctgttgcctt

SEQ ID NO: 28944 - RNA, 21 nt, synthetic construct
  source 1..21: mol_type = other RNA; note = Description of Artificial Sequence: Synthetic oligonucleotide
tattcacccatgctgttgctt

SEQ ID NO: 28945 - RNA, 21 nt, synthetic construct
  source 1..21: mol_type = other RNA; note = Description of Artificial Sequence: Synthetic oligonucleotide
ttattcacccatgctgttgtt

SEQ ID NO: 28946 - RNA, 21 nt, synthetic construct
  source 1..21: mol_type = other RNA; note = Description of Artificial Sequence: Synthetic oligonucleotide
tttattcacccatgctgtttt

SEQ ID NO: 28947 - RNA, 21 nt, synthetic construct
  source 1..21: mol_type = other RNA; note = Description of Artificial Sequence: Synthetic oligonucleotide
tcttattcacccatgctgttt

SEQ ID NO: 28948 - RNA, 21 nt, synthetic construct
  source 1..21: mol_type = other RNA; note = Description of Artificial Sequence: Synthetic oligonucleotide
tccttattcacccatgctgtt

SEQ ID NO: 28949 - RNA, 21 nt, synthetic construct
  source 1..21: mol_type = other RNA; note = Description of Artificial Sequence: Synthetic oligonucleotide
tcccttattcacccatgcttt

SEQ ID NO: 28950 - RNA, 21 nt, synthetic construct
  source 1..21: mol_type = other RNA; note = Description of Artificial Sequence: Synthetic oligonucleotide
tgcccttattcacccatgctt

SEQ ID NO: 28951 - RNA, 21 nt, synthetic construct
  source 1..21: mol_type = other RNA; note = Description of Artificial Sequence: Synthetic oligonucleotide
tagcccttattcacccatgtt

SEQ ID NO: 28952 - RNA, 21 nt, synthetic construct
  source 1..21: mol_type = other RNA; note = Description of Artificial Sequence: Synthetic oligonucleotide
taagcccttattcacccattt

SEQ ID NO: 28953 - RNA, 21 nt, synthetic construct
  source 1..21: mol_type = other RNA; note = Description of Artificial Sequence: Synthetic oligonucleotide
tgaagcccttattcacccatt

SEQ ID NO: 28954 - RNA, 21 nt, synthetic construct
  source 1..21: mol_type = other RNA; note = Description of Artificial Sequence: Synthetic oligonucleotide
tggaagcccttattcaccctt

SEQ ID NO: 28955 - RNA, 21 nt, synthetic construct
  source 1..21: mol_type = other RNA; note = Description of Artificial Sequence: Synthetic oligonucleotide
taggaagcccttattcacctt

SEQ ID NO: 28956 - RNA, 21 nt, synthetic construct
  source 1..21: mol_type = other RNA; note = Description of Artificial Sequence: Synthetic oligonucleotide
tcaggaagcccttattcactt

SEQ ID NO: 28957 - RNA, 21 nt, synthetic construct
  source 1..21: mol_type = other RNA; note = Description of Artificial Sequence: Synthetic oligonucleotide
tacaggaagcccttattcatt

SEQ ID NO: 28958 - RNA, 21 nt, synthetic construct
  source 1..21: mol_type = other RNA; note = Description of Artificial Sequence: Synthetic oligonucleotide
tcacaggaagcccttattctt

SEQ ID NO: 28959 - RNA, 21 nt, synthetic construct
  source 1..21: mol_type = other RNA; note = Description of Artificial Sequence: Synthetic oligonucleotide
tccacaggaagcccttatttt

SEQ ID NO: 28960 - RNA, 21 nt, synthetic construct
  source 1..21: mol_type = other RNA; note = Description of Artificial Sequence: Synthetic oligonucleotide
ttccacaggaagcccttattt

SEQ ID NO: 28961 - RNA, 21 nt, synthetic construct
  source 1..21: mol_type = other RNA; note = Description of Artificial Sequence: Synthetic oligonucleotide
tgtccacaggaagcccttatt

SEQ ID NO: 28962 - RNA, 21 nt, synthetic construct
  source 1..21: mol_type = other RNA; note = Description of Artificial Sequence: Synthetic oligonucleotide
tagtccacaggaagccctttt

SEQ ID NO: 28963 - RNA, 21 nt, synthetic construct
  source 1..21: mol_type = other RNA; note = Description of Artificial Sequence: Synthetic oligonucleotide
tcagtccacaggaagcccttt

SEQ ID NO: 28964 - RNA, 21 nt, synthetic construct
  source 1..21: mol_type = other RNA; note = Description of Artificial Sequence: Synthetic oligonucleotide
tccagtccacaggaagccctt

SEQ ID NO: 28965 - RNA, 21 nt, synthetic construct
  source 1..21: mol_type = other RNA; note = Description of Artificial Sequence: Synthetic oligonucleotide
tgccagtccacaggaagcctt

SEQ ID NO: 28966 - RNA, 21 nt, synthetic construct
  source 1..21: mol_type = other RNA; note = Description of Artificial Sequence: Synthetic oligonucleotide
ttgccagtccacaggaagctt

SEQ ID NO: 28967 - RNA, 21 nt, synthetic construct
  source 1..21: mol_type = other RNA; note = Description of Artificial Sequence: Synthetic oligonucleotide
tttgccagtccacaggaagtt

SEQ ID NO: 28968 - RNA, 21 nt, synthetic construct
  source 1..21: mol_type = other RNA; note = Description of Artificial Sequence: Synthetic oligonucleotide
tattgccagtccacaggaatt

SEQ ID NO: 28969 - RNA, 21 nt, synthetic construct
  source 1..21: mol_type = other RNA; note = Description of Artificial Sequence: Synthetic oligonucleotide
tcattgccagtccacaggatt

SEQ ID NO: 28970 - RNA, 21 nt, synthetic construct
  source 1..21: mol_type = other RNA; note = Description of Artificial Sequence: Synthetic oligonucleotide
ttcattgccagtccacaggtt

SEQ ID NO: 28971 - RNA, 21 nt, synthetic construct
  source 1..21: mol_type = other RNA; note = Description of Artificial Sequence: Synthetic oligonucleotide
tctcattgccagtccacagtt

SEQ ID NO: 28972 - RNA, 21 nt, synthetic construct
  source 1..21: mol_type = other RNA; note = Description of Artificial Sequence: Synthetic oligonucleotide
ttctcattgccagtccacatt

SEQ ID NO: 28973 - RNA, 21 nt, synthetic construct
  source 1..21: mol_type = other RNA; note = Description of Artificial Sequence: Synthetic oligonucleotide
tctctcattgccagtccactt

SEQ ID NO: 28974 - RNA, 21 nt, synthetic construct
  source 1..21: mol_type = other RNA; note = Description of Artificial Sequence: Synthetic oligonucleotide
tcctctcattgccagtccatt

SEQ ID NO: 28975 - RNA, 21 nt, synthetic construct
  source 1..21: mol_type = other RNA; note = Description of Artificial Sequence: Synthetic oligonucleotide
tgcctctcattgccagtcctt

SEQ ID NO: 28976 - RNA, 21 nt, synthetic construct
  source 1..21: mol_type = other RNA; note = Description of Artificial Sequence: Synthetic oligonucleotide
ttgcctctcattgccagtctt

SEQ ID NO: 28977 - RNA, 21 nt, synthetic construct
  source 1..21: mol_type = other RNA; note = Description of Artificial Sequence: Synthetic oligonucleotide
tttgcctctcattgccagttt

SEQ ID NO: 28978 - RNA, 21 nt, synthetic construct
  source 1..21: mol_type = other RNA; note = Description of Artificial Sequence: Synthetic oligonucleotide
ttttgcctctcattgccagtt

SEQ ID NO: 28979 - RNA, 21 nt, synthetic construct
  source 1..21: mol_type = other RNA; note = Description of Artificial Sequence: Synthetic oligonucleotide
tttttgcctctcattgccatt

SEQ ID NO: 28980 - RNA, 21 nt, synthetic construct
  source 1..21: mol_type = other RNA; note = Description of Artificial Sequence: Synthetic oligonucleotide
tgttttgcctctcattgcctt

SEQ ID NO: 28981 - RNA, 21 nt, synthetic construct
  source 1..21: mol_type = other RNA; note = Description of Artificial Sequence: Synthetic oligonucleotide
tggttttgcctctcattgctt

SEQ ID NO: 28982 - RNA, 21 nt, synthetic construct
  source 1..21: mol_type = other RNA; note = Description of Artificial Sequence: Synthetic oligonucleotide
taggttttgcctctcattgtt

SEQ ID NO: 28983 - RNA, 21 nt, synthetic construct
  source 1..21: mol_type = other RNA; note = Description of Artificial Sequence: Synthetic oligonucleotide
tcaggttttgcctctcatttt

SEQ ID NO: 28984 - RNA, 21 nt, synthetic construct
  source 1..21: mol_type = other RNA; note = Description of Artificial Sequence: Synthetic oligonucleotide
tccaggttttgcctctcattt

SEQ ID NO: 28985 - RNA, 21 nt, synthetic construct
  source 1..21: mol_type = other RNA; note = Description of Artificial Sequence: Synthetic oligonucleotide
taccaggttttgcctctcatt

SEQ ID NO: 28986 - RNA, 21 nt, synthetic construct
  source 1..21: mol_type = other RNA; note = Description of Artificial Sequence: Synthetic oligonucleotide
tcaccaggttttgcctctctt

SEQ ID NO: 28987 - RNA, 21 nt, synthetic construct
  source 1..21: mol_type = other RNA; note = Description of Artificial Sequence: Synthetic oligonucleotide
tgcaccaggttttgcctcttt

SEQ ID NO: 28988 - RNA, 21 nt, synthetic construct
  source 1..21: mol_type = other RNA; note = Description of Artificial Sequence: Synthetic oligonucleotide
tagcaccaggttttgcctctt

SEQ ID NO: 28989 - RNA, 21 nt, synthetic construct
  source 1..21: mol_type = other RNA; note = Description of Artificial Sequence: Synthetic oligonucleotide
taagcaccaggttttgccttt

SEQ ID NO: 28990 - RNA, 21 nt, synthetic construct
  source 1..21: mol_type = other RNA; note = Description of Artificial Sequence: Synthetic oligonucleotide
tcaagcaccaggttttgcctt

SEQ ID NO: 28991 - RNA, 21 nt, synthetic construct
  source 1..21: mol_type = other RNA; note = Description of Artificial Sequence: Synthetic oligonucleotide
ttcaagcaccaggttttgctt

SEQ ID NO: 28992 - RNA, 21 nt, synthetic construct
  source 1..21: mol_type = other RNA; note = Description of Artificial Sequence: Synthetic oligonucleotide
tctcaagcaccaggttttgtt

SEQ ID NO: 28993 - RNA, 21 nt, synthetic construct
  source 1..21: mol_type = other RNA; note = Description of Artificial Sequence: Synthetic oligonucleotide
tgctcaagcaccaggtttttt

SEQ ID NO: 28994 - RNA, 21 nt, synthetic construct
  source 1..21: mol_type = other RNA; note = Description of Artificial Sequence: Synthetic oligonucleotide
ttgctcaagcaccaggttttt

SEQ ID NO: 28995 - RNA, 21 nt, synthetic construct
  source 1..21: mol_type = other RNA; note = Description of Artificial Sequence: Synthetic oligonucleotide
tgtgctcaagcaccaggtttt

SEQ ID NO: 28996 - RNA, 21 nt, synthetic construct
  source 1..21: mol_type = other RNA; note = Description of Artificial Sequence: Synthetic oligonucleotide
tagtgctcaagcaccaggttt

SEQ ID NO: 28997 - RNA, 21 nt, synthetic construct
  source 1..21: mol_type = other RNA; note = Description of Artificial Sequence: Synthetic oligonucleotide
tcagtgctcaagcaccaggtt

SEQ ID NO: 28998 - RNA, 21 nt, synthetic construct
  source 1..21: mol_type = other RNA; note = Description of Artificial Sequence: Synthetic oligonucleotide
tccagtgctcaagcaccagtt

SEQ ID NO: 28999 - RNA, 21 nt, synthetic construct
  source 1..21: mol_type = other RNA; note = Description of Artificial Sequence: Synthetic oligonucleotide
tgccagtgctcaagcaccatt

SEQ ID NO: 29000 - RNA, 21 nt, synthetic construct
  source 1..21: mol_type = other RNA; note = Description of Artificial Sequence: Synthetic oligonucleotide
tggccagtgctcaagcacctt

SEQ ID NO: 29001 - RNA, 21 nt, synthetic construct
  source 1..21: mol_type = other RNA; note = Description of Artificial Sequence: Synthetic oligonucleotide
tgggccagtgctcaagcactt

SEQ ID NO: 29002 - RNA, 21 nt, synthetic construct
  source 1..21: mol_type = other RNA; note = Description of Artificial Sequence: Synthetic oligonucleotide
tggggccagtgctcaagcatt

SEQ ID NO: 29003 - RNA, 21 nt, synthetic construct
  source 1..21: mol_type = other RNA; note = Description of Artificial Sequence: Synthetic oligonucleotide
taggggccagtgctcaagctt

SEQ ID NO: 29004 - RNA, 21 nt, synthetic construct
  source 1..21: mol_type = other RNA; note = Description of Artificial Sequence: Synthetic oligonucleotide
ttaggggccagtgctcaagtt

SEQ ID NO: 29005 - RNA, 21 nt, synthetic construct
  source 1..21: mol_type = other RNA; note = Description of Artificial Sequence: Synthetic oligonucleotide
tttaggggccagtgctcaatt

SEQ ID NO: 29006 - RNA, 21 nt, synthetic construct
  source 1..21: mol_type = other RNA; note = Description of Artificial Sequence: Synthetic oligonucleotide
tcttaggggccagtgctcatt

SEQ ID NO: 29007 - RNA, 21 nt, synthetic construct
  source 1..21: mol_type = other RNA; note = Description of Artificial Sequence: Synthetic oligonucleotide
tccttaggggccagtgctctt

SEQ ID NO: 29008 - RNA, 21 nt, synthetic construct
  source 1..21: mol_type = other RNA; note = Description of Artificial Sequence: Synthetic oligonucleotide
tgccttaggggccagtgcttt

SEQ ID NO: 29009 - RNA, 21 nt, synthetic construct
  source 1..21: mol_type = other RNA; note = Description of Artificial Sequence: Synthetic oligonucleotide
ttgccttaggggccagtgctt

SEQ ID NO: 29010 - RNA, 21 nt, synthetic construct
  source 1..21: mol_type = other RNA; note = Description of Artificial Sequence: Synthetic oligonucleotide
tctgccttaggggccagtgtt

SEQ ID NO: 29011 - RNA, 21 nt, synthetic construct
  source 1..21: mol_type = other RNA; note = Description of Artificial Sequence: Synthetic oligonucleotide
tcctgccttaggggccagttt

SEQ ID NO: 29012 - RNA, 21 nt, synthetic construct
  source 1..21: mol_type = other RNA; note = Description of Artificial Sequence: Synthetic oligonucleotide
tgcctgccttaggggccagtt

SEQ ID NO: 29013 - RNA, 21 nt, synthetic construct
  source 1..21: mol_type = other RNA; note = Description of Artificial Sequence: Synthetic oligonucleotide
tggcctgccttaggggccatt

SEQ ID NO: 29014 - RNA, 21 nt, synthetic construct
  source 1..21: mol_type = other RNA; note = Description of Artificial Sequence: Synthetic oligonucleotide
taggcctgccttaggggcctt

SEQ ID NO: 29015 - RNA, 21 nt, synthetic construct
  source 1..21: mol_type = other RNA; note = Description of Artificial Sequence: Synthetic oligonucleotide
taaggcctgccttaggggctt

SEQ ID NO: 29016 - RNA, 21 nt, synthetic construct
  source 1..21: mol_type = other RNA; note = Description of Artificial Sequence: Synthetic oligonucleotide
ttaaggcctgccttaggggtt

SEQ ID NO: 29017 - RNA, 21 nt, synthetic construct
  source 1..21: mol_type = other RNA; note = Description of Artificial Sequence: Synthetic oligonucleotide
tgtaaggcctgccttagggtt

SEQ ID NO: 29018 - RNA, 21 nt, synthetic construct
  source 1..21: mol_type = other RNA; note = Description of Artificial Sequence: Synthetic oligonucleotide
ttgtaaggcctgccttaggtt

SEQ ID NO: 29019 - RNA, 21 nt, synthetic construct
  source 1..21: mol_type = other RNA; note = Description of Artificial Sequence: Synthetic oligonucleotide
tctgtaaggcctgccttagtt

SEQ ID NO: 29020 - RNA, 21 nt, synthetic construct
  source 1..21: mol_type = other RNA; note = Description of Artificial Sequence: Synthetic oligonucleotide
ttctgtaaggcctgccttatt

SEQ ID NO: 29021 - RNA, 21 nt, synthetic construct
  source 1..21: mol_type = other RNA; note = Description of Artificial Sequence: Synthetic oligonucleotide
tatctgtaaggcctgcctttt

SEQ ID NO: 29022 - RNA, 21 nt, synthetic construct
  source 1..21: mol_type = other RNA; note = Description of Artificial Sequence: Synthetic oligonucleotide
tgatctgtaaggcctgccttt

SEQ ID NO: 29023 - RNA, 21 nt, synthetic construct
  source 1..21: mol_type = other RNA; note = Description of Artificial Sequence: Synthetic oligonucleotide
tagatctgtaaggcctgcctt

SEQ ID NO: 29024 - RNA, 21 nt, synthetic construct
  source 1..21: mol_type = other RNA; note = Description of Artificial Sequence: Synthetic oligonucleotide
tgagatctgtaaggcctgctt

SEQ ID NO: 29025 - RNA, 21 nt, synthetic construct
  source 1..21: mol_type = other RNA; note = Description of Artificial Sequence: Synthetic oligonucleotide
tagagatctgtaaggcctgtt

SEQ ID NO: 29026 - RNA, 21 nt, synthetic construct
  source 1..21: mol_type = other RNA; note = Description of Artificial Sequence: Synthetic oligonucleotide
taagagatctgtaaggccttt

SEQ ID NO: 29027 - RNA, 21 nt, synthetic construct
  source 1..21: mol_type = other RNA; note = Description of Artificial Sequence: Synthetic oligonucleotide
ttaagagatctgtaaggcctt

SEQ ID NO: 29028 - RNA, 21 nt, synthetic construct
  source 1..21: mol_type = other RNA; note = Description of Artificial Sequence: Synthetic oligonucleotide
tgtaagagatctgtaaggctt

SEQ ID NO: 29029 - RNA, 21 nt, synthetic construct
  source 1..21: mol_type = other RNA; note = Description of Artificial Sequence: Synthetic oligonucleotide
ttgtaagagatctgtaaggtt

SEQ ID NO: 29030 - RNA, 21 nt, synthetic construct
  source 1..21: mol_type = other RNA; note = Description of Artificial Sequence: Synthetic oligonucleotide
tgtgtaagagatctgtaagtt

SEQ ID NO: 29031 - RNA, 21 nt, synthetic construct
  source 1..21: mol_type = other RNA; note = Description of Artificial Sequence: Synthetic oligonucleotide
tagtgtaagagatctgtaatt

SEQ ID NO: 29032 - RNA, 21 nt, synthetic construct
  source 1..21: mol_type = other RNA; note = Description of Artificial Sequence: Synthetic oligonucleotide
tgagtgtaagagatctgtatt

SEQ ID NO: 29033 - RNA, 21 nt, synthetic construct
  source 1..21: mol_type = other RNA; note = Description of Artificial Sequence: Synthetic oligonucleotide
tcgagtgtaagagatctgttt

SEQ ID NO: 29034 - RNA, 21 nt, synthetic construct
  source 1..21: mol_type = other RNA; note = Description of Artificial Sequence: Synthetic oligonucleotide
tacgagtgtaagagatctgtt

SEQ ID NO: 29035 - RNA, 21 nt, synthetic construct
  source 1..21: mol_type = other RNA; note = Description of Artificial Sequence: Synthetic oligonucleotide
tcacgagtgtaagagatcttt

SEQ ID NO: 29036 - RNA, 21 nt, synthetic construct
  source 1..21: mol_type = other RNA; note = Description of Artificial Sequence: Synthetic oligonucleotide
tccacgagtgtaagagatctt

SEQ ID NO: 29037 - RNA, 21 nt, synthetic construct
  source 1..21: mol_type = other RNA; note = Description of Artificial Sequence: Synthetic oligonucleotide
taccacgagtgtaagagattt

SEQ ID NO: 29038 - RNA, 21 nt, synthetic construct
  source 1..21: mol_type = other RNA; note = Description of Artificial Sequence: Synthetic oligonucleotide
tcaccacgagtgtaagagatt

SEQ ID NO: 29039 - RNA, 21 nt, synthetic construct
  source 1..21: mol_type = other RNA; note = Description of Artificial Sequence: Synthetic oligonucleotide
tccaccacgagtgtaagagtt

SEQ ID NO: 29040 - RNA, 21 nt, synthetic construct
  source 1..21: mol_type = other RNA; note = Description of Artificial Sequence: Synthetic oligonucleotide
tcccaccacgagtgtaagatt

SEQ ID NO: 29041 - RNA, 21 nt, synthetic construct
  source 1..21: mol_type = other RNA; note = Description of Artificial Sequence: Synthetic oligonucleotide
ttcccaccacgagtgtaagtt

SEQ ID NO: 29042 - RNA, 21 nt, synthetic construct
  source 1..21: mol_type = other RNA; note = Description of Artificial Sequence: Synthetic oligonucleotide
tttcccaccacgagtgtaatt

SEQ ID NO: 29043 - RNA, 21 nt, synthetic construct
  source 1..21: mol_type = other RNA; note = Description of Artificial Sequence: Synthetic oligonucleotide
tcttcccaccacgagtgtatt

SEQ ID NO: 29044 - RNA, 21 nt, synthetic construct
  source 1..21: mol_type = other RNA; note = Description of Artificial Sequence: Synthetic oligonucleotide
ttcttcccaccacgagtgttt

SEQ ID NO: 29045 - RNA, 21 nt, synthetic construct
  source 1..21: mol_type = other RNA; note = Description of Artificial Sequence: Synthetic oligonucleotide
tctcttcccaccacgagtgtt

SEQ ID NO: 29046 - RNA, 21 nt, synthetic construct
  source 1..21: mol_type = other RNA; note = Description of Artificial Sequence: Synthetic oligonucleotide
tactcttcccaccacgagttt

SEQ ID NO: 29047 - RNA, 21 nt, synthetic construct
  source 1..21: mol_type = other RNA; note = Description of Artificial Sequence: Synthetic oligonucleotide
taactcttcccaccacgagtt

SEQ ID NO: 29048 - RNA, 21 nt, synthetic construct
  source 1..21: mol_type = other RNA; note = Description of Artificial Sequence: Synthetic oligonucleotide
taaactcttcccaccacgatt

SEQ ID NO: 29049 - RNA, 21 nt, synthetic construct
  source 1..21: mol_type = other RNA; note = Description of Artificial Sequence: Synthetic oligonucleotide
ttaaactcttcccaccacgtt

SEQ ID NO: 29050 - RNA, 21 nt, synthetic construct
  source 1..21: mol_type = other RNA; note = Description of Artificial Sequence: Synthetic oligonucleotide
tctaaactcttcccaccactt

SEQ ID NO: 29051 - RNA, 21 nt, synthetic construct
  source 1..21: mol_type = other RNA; note = Description of Artificial Sequence: Synthetic oligonucleotide
tactaaactcttcccaccatt

SEQ ID NO: 29052 - RNA, 21 nt, synthetic construct
  source 1..21: mol_type = other RNA; note = Description of Artificial Sequence: Synthetic oligonucleotide
tcactaaactcttcccacctt

SEQ ID NO: 29053 - RNA, 21 nt, synthetic construct
  source 1..21: mol_type = other RNA; note = Description of Artificial Sequence: Synthetic oligonucleotide
tacactaaactcttcccactt

SEQ ID NO: 29054 - RNA, 21 nt, synthetic construct
  source 1..21: mol_type = other RNA; note = Description of Artificial Sequence: Synthetic oligonucleotide
tcacactaaactcttcccatt

SEQ ID NO: 29055 - RNA, 21 nt, synthetic construct
  source 1..21: mol_type = other RNA; note = Description of Artificial Sequence: Synthetic oligonucleotide
ttcacactaaactcttccctt

SEQ ID NO: 29056 - RNA, 21 nt, synthetic construct
  source 1..21: mol_type = other RNA; note = Description of Artificial Sequence: Synthetic oligonucleotide
tttcacactaaactcttcctt

SEQ ID NO: 29057 - RNA, 21 nt, synthetic construct
  source 1..21: mol_type = other RNA; note = Description of Artificial Sequence: Synthetic oligonucleotide
ttttcacactaaactcttctt

SEQ ID NO: 29058 - RNA, 21 nt, synthetic construct
  source 1..21: mol_type = other RNA; note = Description of Artificial Sequence: Synthetic oligonucleotide
tgtttcacactaaactctttt

SEQ ID NO: 29059 - RNA, 21 nt, synthetic construct
  source 1..21: mol_type = other RNA; note = Description of Artificial Sequence: Synthetic oligonucleotide
tagtttcacactaaactcttt

SEQ ID NO: 29060 - RNA, 21 nt, synthetic construct
  source 1..21: mol_type = other RNA; note = Description of Artificial Sequence: Synthetic oligonucleotide
tcagtttcacactaaactctt

SEQ ID NO: 29061 - RNA, 21 nt, synthetic construct
  source 1..21: mol_type = other RNA; note = Description of Artificial Sequence: Synthetic oligonucleotide
tccagtttcacactaaacttt

SEQ ID NO: 29062 - RNA, 21 nt, synthetic construct
  source 1..21: mol_type = other RNA; note = Description of Artificial Sequence: Synthetic oligonucleotide
tcccagtttcacactaaactt

SEQ ID NO: 29063 - RNA, 21 nt, synthetic construct
  source 1..21: mol_type = other RNA; note = Description of Artificial Sequence: Synthetic oligonucleotide
tccccagtttcacactaaatt

SEQ ID NO: 29064 - RNA, 21 nt, synthetic construct
  source 1..21: mol_type = other RNA; note = Description of Artificial Sequence: Synthetic oligonucleotide
taccccagtttcacactaatt

SEQ ID NO: 29065 - RNA, 21 nt, synthetic construct
  source 1..21: mol_type = other RNA; note = Description of Artificial Sequence: Synthetic oligonucleotide
tcaccccagtttcacactatt

SEQ ID NO: 29066 - RNA, 21 nt, synthetic construct
  source 1..21: mol_type = other RNA; note = Description of Artificial Sequence: Synthetic oligonucleotide
tccaccccagtttcacacttt

SEQ ID NO: 29067 - RNA, 21 nt, synthetic construct
  source 1..21: mol_type = other RNA; note = Description of Artificial Sequence: Synthetic oligonucleotide
ttccaccccagtttcacactt

SEQ ID NO: 29068 - RNA, 21 nt, synthetic construct
  source 1..21: mol_type = other RNA; note = Description of Artificial Sequence: Synthetic oligonucleotide
tttccaccccagtttcacatt

SEQ ID NO: 29069 - RNA, 21 nt, synthetic construct
  source 1..21: mol_type = other RNA; note = Description of Artificial Sequence: Synthetic oligonucleotide
tattccaccccagtttcactt

SEQ ID NO: 29070 - RNA, 21 nt, synthetic construct
  source 1..21: mol_type = other RNA; note = Description of Artificial Sequence: Synthetic oligonucleotide
taattccaccccagtttcatt

SEQ ID NO: 29071 - RNA, 21 nt, synthetic construct
  source 1..21: mol_type = other RNA; note = Description of Artificial Sequence: Synthetic oligonucleotide
tcaattccaccccagtttctt

SEQ ID NO: 29072 - RNA, 21 nt, synthetic construct
  source 1..21: mol_type = other RNA; note = Description of Artificial Sequence: Synthetic oligonucleotide
tccaattccaccccagttttt

SEQ ID NO: 29073 - RNA, 21 nt, synthetic construct
  source 1..21: mol_type = other RNA; note = Description of Artificial Sequence: Synthetic oligonucleotide
tcccaattccaccccagtttt

SEQ ID NO: 29074 - RNA, 21 nt, synthetic construct
  source 1..21: mol_type = other RNA; note = Description of Artificial Sequence: Synthetic oligonucleotide
tacccaattccaccccagttt

SEQ ID NO: 29075 - RNA, 21 nt, synthetic construct
  source 1..21: mol_type = other RNA; note = Description of Artificial Sequence: Synthetic oligonucleotide
tcacccaattccaccccagtt

SEQ ID NO: 29076 - RNA, 21 nt, synthetic construct
  source 1..21: mol_type = other RNA; note = Description of Artificial Sequence: Synthetic oligonucleotide
tacacccaattccaccccatt

SEQ ID NO: 29077 - RNA, 21 nt, synthetic construct
  source 1..21: mol_type = other RNA; note = Description of Artificial Sequence: Synthetic oligonucleotide
tgacacccaattccacccctt

SEQ ID NO: 29078 - RNA, 21 nt, synthetic construct
  source 1..21: mol_type = other RNA; note = Description of Artificial Sequence: Synthetic oligonucleotide
tggacacccaattccaccctt

SEQ ID NO: 29079 - RNA, 21 nt, synthetic construct
  source 1..21: mol_type = other RNA; note = Description of Artificial Sequence: Synthetic oligonucleotide
ttggacacccaattccacctt

SEQ ID NO: 29080 - RNA, 21 nt, synthetic construct
  source 1..21: mol_type = other RNA; note = Description of Artificial Sequence: Synthetic oligonucleotide
tgtggacacccaattccactt

SEQ ID NO: 29081 - RNA, 21 nt, synthetic construct
  source 1..21: mol_type = other RNA; note = Description of Artificial Sequence: Synthetic oligonucleotide
tcgtggacacccaattccatt

SEQ ID NO: 29082 - RNA, 21 nt, synthetic construct
  source 1..21: mol_type = other RNA; note = Description of Artificial Sequence: Synthetic oligonucleotide
tacgtggacacccaattcctt

SEQ ID NO: 29083 - RNA, 21 nt, synthetic construct
  source 1..21: mol_type = other RNA; note = Description of Artificial Sequence: Synthetic oligonucleotide
ttacgtggacacccaattctt

SEQ ID NO: 29084 - RNA, 21 nt, synthetic construct
  source 1..21: mol_type = other RNA; note = Description of Artificial Sequence: Synthetic oligonucleotide
tatacgtggacacccaatttt

SEQ ID NO: 29085 - RNA, 21 nt, synthetic construct
  source 1..21: mol_type = other RNA; note = Description of Artificial Sequence: Synthetic oligonucleotide
tcatacgtggacacccaattt

SEQ ID NO: 29086 - RNA, 21 nt, synthetic construct
  source 1..21: mol_type = other RNA; note = Description of Artificial Sequence: Synthetic oligonucleotide
tacatacgtggacacccaatt

SEQ ID NO: 29087 - RNA, 21 nt, synthetic construct
  source 1..21: mol_type = other RNA; note = Description of Artificial Sequence: Synthetic oligonucleotide
taacatacgtggacacccatt

SEQ ID NO: 29088 - RNA, 21 nt, synthetic construct
  source 1..21: mol_type = other RNA; note = Description of Artificial Sequence: Synthetic oligonucleotide
tgaacatacgtggacaccctt

SEQ ID NO: 29089 - RNA, 21 nt, synthetic construct
  source 1..21: mol_type = other RNA; note = Description of Artificial Sequence: Synthetic oligonucleotide
tggaacatacgtggacacctt

SEQ ID NO: 29090 - RNA, 21 nt, synthetic construct
  source 1..21: mol_type = other RNA; note = Description of Artificial Sequence: Synthetic oligonucleotide
tgggaacatacgtggacactt

SEQ ID NO: 29091 - RNA, 21 nt, synthetic construct
  source 1..21: mol_type = other RNA; note = Description of Artificial Sequence: Synthetic oligonucleotide
tagggaacatacgtggacatt

SEQ ID NO: 29092 - RNA, 21 nt, synthetic construct
  source 1..21: mol_type = other RNA; note = Description of Artificial Sequence: Synthetic oligonucleotide
taagggaacatacgtggactt

SEQ ID NO: 29093 - RNA, 21 nt, synthetic construct
  source 1..21: mol_type = other RNA; note = Description of Artificial Sequence: Synthetic oligonucleotide
taaagggaacatacgtggatt

SEQ ID NO: 29094 - RNA, 21 nt, synthetic construct
  source 1..21: mol_type = other RNA; note = Description of Artificial Sequence: Synthetic oligonucleotide
taaaagggaacatacgtggtt

SEQ ID NO: 29095 - RNA, 21 nt, synthetic construct
  source 1..21: mol_type = other RNA; note = Description of Artificial Sequence: Synthetic oligonucleotide
tcaaaagggaacatacgtgtt

SEQ ID NO: 29096 - RNA, 21 nt, synthetic construct
  source 1..21: mol_type = other RNA; note = Description of Artificial Sequence: Synthetic oligonucleotide
tgcaaaagggaacatacgttt

SEQ ID NO: 29097 - RNA, 21 nt, synthetic construct
  source 1..21: mol_type = other RNA; note = Description of Artificial Sequence: Synthetic oligonucleotide
tggcaaaagggaacatacgtt

SEQ ID NO: 29098 - RNA, 21 nt, synthetic construct
  source 1..21: mol_type = other RNA; note = Description of Artificial Sequence: Synthetic oligonucleotide
taggcaaaagggaacatactt

SEQ ID NO: 29099 - RNA, 21 nt, synthetic construct
  source 1..21: mol_type = other RNA; note = Description of Artificial Sequence: Synthetic oligonucleotide
taaggcaaaagggaacatatt

SEQ ID NO: 29100 - RNA, 21 nt, synthetic construct
  source 1..21: mol_type = other RNA; note = Description of Artificial Sequence: Synthetic oligonucleotide
ttaaggcaaaagggaacattt

SEQ ID NO: 29101 - RNA, 21 nt, synthetic construct
  source 1..21: mol_type = other RNA; note = Description of Artificial Sequence: Synthetic oligonucleotide
tgtaaggcaaaagggaacatt

SEQ ID NO: 29102 - RNA, 21 nt, synthetic construct
  source 1..21: mol_type = other RNA; note = Description of Artificial Sequence: Synthetic oligonucleotide
tagtaaggcaaaagggaactt

SEQ ID NO: 29103 - RNA, 21 nt, synthetic construct
  source 1..21: mol_type = other RNA; note = Description of Artificial Sequence: Synthetic oligonucleotide
ttagtaaggcaaaagggaatt

SEQ ID NO: 29104 - RNA, 21 nt, synthetic construct
  source 1..21: mol_type = other RNA; note = Description of Artificial Sequence: Synthetic oligonucleotide
tatagtaaggcaaaagggatt

SEQ ID NO: 29105 - RNA, 21 nt, synthetic construct
  source 1..21: mol_type = other RNA; note = Description of Artificial Sequence: Synthetic oligonucleotide
ttatagtaaggcaaaagggtt

SEQ ID NO: 29106 - RNA, 21 nt, synthetic construct
  source 1..21: mol_type = other RNA; note = Description of Artificial Sequence: Synthetic oligonucleotide
tatatagtaaggcaaaaggtt

SEQ ID NO: 29107 - RNA, 21 nt, synthetic construct
  source 1..21: mol_type = other RNA; note = Description of Artificial Sequence: Synthetic oligonucleotide
tcatatagtaaggcaaaagtt

SEQ ID NO: 29108 - RNA, 21 nt, synthetic construct
  source 1..21: mol_type = other RNA; note = Description of Artificial Sequence: Synthetic oligonucleotide
tacatatagtaaggcaaaatt

SEQ ID NO: 29109 - RNA, 21 nt, synthetic construct
  source 1..21: mol_type = other RNA; note = Description of Artificial Sequence: Synthetic oligonucleotide
taacatatagtaaggcaaatt

SEQ ID NO: 29110 - RNA, 21 nt, synthetic construct
  source 1..21: mol_type = other RNA; note = Description of Artificial Sequence: Synthetic oligonucleotide
tgaacatatagtaaggcaatt

SEQ ID NO: 29111 - RNA, 21 nt, synthetic construct
  source 1..21: mol_type = other RNA; note = Description of Artificial Sequence: Synthetic oligonucleotide
tagaacatatagtaaggcatt

SEQ ID NO: 29112 - RNA, 21 nt, synthetic construct
  source 1..21: mol_type = other RNA; note = Description of Artificial Sequence: Synthetic oligonucleotide
tcagaacatatagtaaggctt

SEQ ID NO: 29113 - RNA, 21 nt, synthetic construct
  source 1..21: mol_type = other RNA; note = Description of Artificial Sequence: Synthetic oligonucleotide
tacagaacatatagtaaggtt

SEQ ID NO: 29114 - RNA, 21 nt, synthetic construct
  source 1..21: mol_type = other RNA; note = Description of Artificial Sequence: Synthetic oligonucleotide
tgacagaacatatagtaagtt

SEQ ID NO: 29115 - RNA, 21 nt, synthetic construct
  source 1..21: mol_type = other RNA; note = Description of Artificial Sequence: Synthetic oligonucleotide
ttgacagaacatatagtaatt

SEQ ID NO: 29116 - RNA, 21 nt, synthetic construct
  source 1..21: mol_type = other RNA; note = Description of Artificial Sequence: Synthetic oligonucleotide
tctgacagaacatatagtatt

SEQ ID NO: 29117 - RNA, 21 nt, synthetic construct
  source 1..21: mol_type = other RNA; note = Description of Artificial Sequence: Synthetic oligonucleotide
tactgacagaacatatagttt

SEQ ID NO: 29118 - RNA, 21 nt, synthetic construct
  source 1..21: mol_type = other RNA; note = Description of Artificial Sequence: Synthetic oligonucleotide
taactgacagaacatatagtt

SEQ ID NO: 29119 - RNA, 21 nt, synthetic construct
  source 1..21: mol_type = other RNA; note = Description of Artificial Sequence: Synthetic oligonucleotide
taaactgacagaacatatatt

SEQ ID NO: 29120 - RNA, 21 nt, synthetic construct
  source 1..21: mol_type = other RNA; note = Description of Artificial Sequence: Synthetic oligonucleotide
tgaaactgacagaacatattt

SEQ ID NO: 29121 - RNA, 21 nt, synthetic construct
  source 1..21: mol_type = other RNA; note = Description of Artificial Sequence: Synthetic oligonucleotide
tagaaactgacagaacatatt

SEQ ID NO: 29122 - RNA, 21 nt, synthetic construct
  source 1..21: mol_type = other RNA; note = Description of Artificial Sequence: Synthetic oligonucleotide
taagaaactgacagaacattt

SEQ ID NO: 29123 - RNA, 21 nt, synthetic construct
  source 1..21: mol_type = other RNA; note = Description of Artificial Sequence: Synthetic oligonucleotide
taaagaaactgacagaacatt

SEQ ID NO: 29124 - RNA, 21 nt, synthetic construct
  source 1..21: mol_type = other RNA; note = Description of Artificial Sequence: Synthetic oligonucleotide
tgaaagaaactgacagaactt

SEQ ID NO: 29125 - RNA, 21 nt, synthetic construct
  source 1..21: mol_type = other RNA; note = Description of Artificial Sequence: Synthetic oligonucleotide
ttgaaagaaactgacagaatt

SEQ ID NO: 29126 - RNA, 21 nt, synthetic construct
  source 1..21: mol_type = other RNA; note = Description of Artificial Sequence: Synthetic oligonucleotide
tctgaaagaaactgacagatt

SEQ ID NO: 29127 - RNA, 21 nt, synthetic construct
  source 1..21: mol_type = other RNA; note = Description of Artificial Sequence: Synthetic oligonucleotide
tcctgaaagaaactgacagtt

SEQ ID NO: 29128 - RNA, 21 nt, synthetic construct
  source 1..21: mol_type = other RNA; note = Description of Artificial Sequence: Synthetic oligonucleotide
ttcctgaaagaaactgacatt

SEQ ID NO: 29129 - RNA, 21 nt, synthetic construct
  source 1..21: mol_type = other RNA; note = Description of Artificial Sequence: Synthetic oligonucleotide
tttcctgaaagaaactgactt

SEQ ID NO: 29130 - RNA, 21 nt, synthetic construct
  source 1..21: mol_type = other RNA; note = Description of Artificial Sequence: Synthetic oligonucleotide
ttttcctgaaagaaactgatt

SEQ ID NO: 29131 - RNA, 21 nt, synthetic construct
  source 1..21: mol_type = other RNA; note = Description of Artificial Sequence: Synthetic oligonucleotide
tttttcctgaaagaaactgtt

SEQ ID NO: 29132 - RNA, 21 nt, synthetic construct
  source 1..21: mol_type = other RNA; note = Description of Artificial Sequence: Synthetic oligonucleotide
tattttcctgaaagaaacttt

SEQ ID NO: 29133 - RNA, 21 nt, synthetic construct
  source 1..21: mol_type = other RNA; note = Description of Artificial Sequence: Synthetic oligonucleotide
tgattttcctgaaagaaactt

SEQ ID NO: 29134 - RNA, 21 nt, synthetic construct
  source 1..21: mol_type = other RNA; note = Description of Artificial Sequence: Synthetic oligonucleotide
tagattttcctgaaagaaatt

SEQ ID NO: 29135 - RNA, 21 nt, synthetic construct
  source 1..21: mol_type = other RNA; note = Description of Artificial Sequence: Synthetic oligonucleotide
taagattttcctgaaagaatt

SEQ ID NO: 29136 - RNA, 21 nt, synthetic construct
  source 1..21: mol_type = other RNA; note = Description of Artificial Sequence: Synthetic oligonucleotide
tgaagattttcctgaaagatt

SEQ ID NO: 29137 - RNA, 21 nt, synthetic construct
  source 1..21: mol_type = other RNA; note = Description of Artificial Sequence: Synthetic oligonucleotide
ttgaagattttcctgaaagtt

SEQ ID NO: 29138 - RNA, 21 nt, synthetic construct
  source 1..21: mol_type = other RNA; note = Description of Artificial Sequence: Synthetic oligonucleotide
tatgaagattttcctgaaatt

SEQ ID NO: 29139 - RNA, 21 nt, synthetic construct
  source 1..21: mol_type = other RNA; note = Description of Artificial Sequence: Synthetic oligonucleotide
tgatgaagattttcctgaatt

SEQ ID NO: 29140 - RNA, 21 nt, synthetic construct
  source 1..21: mol_type = other RNA; note = Description of Artificial Sequence: Synthetic oligonucleotide
tagatgaagattttcctgatt

SEQ ID NO: 29141 - RNA, 21 nt, synthetic construct
  source 1..21: mol_type = other RNA; note = Description of Artificial Sequence: Synthetic oligonucleotide
taagatgaagattttcctgtt

SEQ ID NO: 29142 - RNA, 21 nt, synthetic construct
  source 1..21: mol_type = other RNA; note = Description of Artificial Sequence: Synthetic oligonucleotide
ttaagatgaagattttccttt

SEQ ID NO: 29143 - RNA, 21 nt, synthetic construct
  source 1..21: mol_type = other RNA; note = Description of Artificial Sequence: Synthetic oligonucleotide
tgtaagatgaagattttcctt

SEQ ID NO: 29144 - RNA, 21 nt, synthetic construct
  source 1..21: mol_type = other RNA; note = Description of Artificial Sequence: Synthetic oligonucleotide
ttgtaagatgaagattttctt

SEQ ID NO: 29145 - RNA, 21 nt, synthetic construct
  source 1..21: mol_type = other RNA; note = Description of Artificial Sequence: Synthetic oligonucleotide
tttgtaagatgaagatttttt

SEQ ID NO: 29146 - RNA, 21 nt, synthetic construct
  source 1..21: mol_type = other RNA; note = Description of Artificial Sequence: Synthetic oligonucleotide
tgttgtaagatgaagattttt

SEQ ID NO: 29147 - RNA, 21 nt, synthetic construct
  source 1..21: mol_type = other RNA; note = Description of Artificial Sequence: Synthetic oligonucleotide
tagttgtaagatgaagatttt

SEQ ID NO: 29148 - RNA, 21 nt, synthetic construct
  source 1..21: mol_type = other RNA; note = Description of Artificial Sequence: Synthetic oligonucleotide
taagttgtaagatgaagattt

SEQ ID NO: 29149 - RNA, 21 nt, synthetic construct
  source 1..21: mol_type = other RNA; note = Description of Artificial Sequence: Synthetic oligonucleotide
tcaagttgtaagatgaagatt

SEQ ID NO: 29150 - RNA, 21 nt, synthetic construct
  source 1..21: mol_type = other RNA; note = Description of Artificial Sequence: Synthetic oligonucleotide
tacaagttgtaagatgaagtt

SEQ ID NO: 29151 - RNA, 21 nt, synthetic construct
  source 1..21: mol_type = other RNA; note = Description of Artificial Sequence: Synthetic oligonucleotide
ttacaagttgtaagatgaatt

SEQ ID NO: 29152 - RNA, 21 nt, synthetic construct
  source 1..21: mol_type = other RNA; note = Description of Artificial Sequence: Synthetic oligonucleotide
tctacaagttgtaagatgatt

SEQ ID NO: 29153 - RNA, 21 nt, synthetic construct
  source 1..21: mol_type = other RNA; note = Description of Artificial Sequence: Synthetic oligonucleotide
tcctacaagttgtaagatgtt

SEQ ID NO: 29154 - RNA, 21 nt, synthetic construct
  source 1..21: mol_type = other RNA; note = Description of Artificial Sequence: Synthetic oligonucleotide
tccctacaagttgtaagattt

SEQ ID NO: 29155 - RNA, 21 nt, synthetic construct
  source 1..21: mol_type = other RNA; note = Description of Artificial Sequence: Synthetic oligonucleotide
tgccctacaagttgtaagatt

SEQ ID NO: 29156 - RNA, 21 nt, synthetic construct
  source 1..21: mol_type = other RNA; note = Description of Artificial Sequence: Synthetic oligonucleotide
tagccctacaagttgtaagtt

SEQ ID NO: 29157 - RNA, 21 nt, synthetic construct
  source 1..21: mol_type = other RNA; note = Description of Artificial Sequence: Synthetic oligonucleotide
tcagccctacaagttgtaatt

SEQ ID NO: 29158 - RNA, 21 nt, synthetic construct
  source 1..21: mol_type = other RNA; note = Description of Artificial Sequence: Synthetic oligonucleotide
tccagccctacaagttgtatt

SEQ ID NO: 29159 - RNA, 21 nt, synthetic construct
  source 1..21: mol_type = other RNA; note = Description of Artificial Sequence: Synthetic oligonucleotide
taccagccctacaagttgttt

SEQ ID NO: 29160 - RNA, 21 nt, synthetic construct
  source 1..21: mol_type = other RNA; note = Description of Artificial Sequence: Synthetic oligonucleotide
tcaccagccctacaagttgtt

SEQ ID NO: 29161 - RNA, 21 nt, synthetic construct
  source 1..21: mol_type = other RNA; note = Description of Artificial Sequence: Synthetic oligonucleotide
tacaccagccctacaagtttt

SEQ ID NO: 29162 - RNA, 21 nt, synthetic construct
  source 1..21: mol_type = other RNA; note = Description of Artificial Sequence: Synthetic oligonucleotide
taacaccagccctacaagttt

SEQ ID NO: 29163 - RNA, 21 nt, synthetic construct
  source 1..21: mol_type = other RNA; note = Description of Artificial Sequence: Synthetic oligonucleotide
ttaacaccagccctacaagtt

SEQ ID NO: 29164 - RNA, 21 nt, synthetic construct
  source 1..21: mol_type = other RNA; note = Description of Artificial Sequence: Synthetic oligonucleotide
tttaacaccagccctacaatt

SEQ ID NO: 29165 - RNA, 21 nt, synthetic construct
  source 1..21: mol_type = other RNA; note = Description of Artificial Sequence: Synthetic oligonucleotide
tgttaacaccagccctacatt

SEQ ID NO: 29166 - RNA, 21 nt, synthetic construct
  source 1..21: mol_type = other RNA; note = Description of Artificial Sequence: Synthetic oligonucleotide
tagttaacaccagccctactt

SEQ ID NO: 29167 - RNA, 21 nt, synthetic construct
  source 1..21: mol_type = other RNA; note = Description of Artificial Sequence: Synthetic oligonucleotide
taagttaacaccagccctatt

SEQ ID NO: 29168 - RNA, 21 nt, synthetic construct
  source 1..21: mol_type = other RNA; note = Description of Artificial Sequence: Synthetic oligonucleotide
ttaagttaacaccagcccttt

SEQ ID NO: 29169 - RNA, 21 nt, synthetic construct
  source 1..21: mol_type = other RNA; note = Description of Artificial Sequence: Synthetic oligonucleotide
tgtaagttaacaccagccctt

SEQ ID NO: 29170 - RNA, 21 nt, synthetic construct
  source 1..21: mol_type = other RNA; note = Description of Artificial Sequence: Synthetic oligonucleotide
tcgtaagttaacaccagcctt

SEQ ID NO: 29171 - RNA, 21 nt, synthetic construct
  source 1..21: mol_type = other RNA; note = Description of Artificial Sequence: Synthetic oligonucleotide
ttcgtaagttaacaccagctt

SEQ ID NO: 29172 - RNA, 21 nt, synthetic construct
  source 1..21: mol_type = other RNA; note = Description of Artificial Sequence: Synthetic oligonucleotide
tgtcgtaagttaacaccagtt

SEQ ID NO: 29173 - RNA, 21 nt, synthetic construct
  source 1..21: mol_type = other RNA; note = Description of Artificial Sequence: Synthetic oligonucleotide
tagtcgtaagttaacaccatt

SEQ ID NO: 29174 - RNA, 21 nt, synthetic construct
  source 1..21: mol_type = other RNA; note = Description of Artificial Sequence: Synthetic oligonucleotide
taagtcgtaagttaacacctt

SEQ ID NO: 29175 - RNA, 21 nt, synthetic construct
  source 1..21: mol_type = other RNA; note = Description of Artificial Sequence: Synthetic oligonucleotide
tgaagtcgtaagttaacactt

SEQ ID NO: 29176 - RNA, 21 nt, synthetic construct
  source 1..21: mol_type = other RNA; note = Description of Artificial Sequence: Synthetic oligonucleotide
ttgaagtcgtaagttaacatt

SEQ ID NO: 29177 - RNA, 21 nt, synthetic construct
  source 1..21: mol_type = other RNA; note = Description of Artificial Sequence: Synthetic oligonucleotide
tgtgaagtcgtaagttaactt

SEQ ID NO: 29178 - RNA, 21 nt, synthetic construct
  source 1..21: mol_type = other RNA; note = Description of Artificial Sequence: Synthetic oligonucleotide
tagtgaagtcgtaagttaatt

SEQ ID NO: 29179 - RNA, 21 nt, synthetic construct
  source 1..21: mol_type = other RNA; note = Description of Artificial Sequence: Synthetic oligonucleotide
ttagtgaagtcgtaagttatt

SEQ ID NO: 29180 - RNA, 21 nt, synthetic construct
  source 1..21: mol_type = other RNA; note = Description of Artificial Sequence: Synthetic oligonucleotide
tttagtgaagtcgtaagtttt

SEQ ID NO: 29181 - RNA, 21 nt, synthetic construct
  source 1..21: mol_type = other RNA; note = Description of Artificial Sequence: Synthetic oligonucleotide
tgttagtgaagtcgtaagttt

SEQ ID NO: 29182 - RNA, 21 nt, synthetic construct
  source 1..21: mol_type = other RNA; note = Description of Artificial Sequence: Synthetic oligonucleotide
tagttagtgaagtcgtaagtt

SEQ ID NO: 29183 - RNA, 21 nt, synthetic construct
  source 1..21: mol_type = other RNA; note = Description of Artificial Sequence: Synthetic oligonucleotide
tcagttagtgaagtcgtaatt

SEQ ID NO: 29184 - RNA, 21 nt, synthetic construct
  source 1..21: mol_type = other RNA; note = Description of Artificial Sequence: Synthetic oligonucleotide
tacagttagtgaagtcgtatt

SEQ ID NO: 29185 - RNA, 21 nt, synthetic construct
  source 1..21: mol_type = other RNA; note = Description of Artificial Sequence: Synthetic oligonucleotide
tcacagttagtgaagtcgttt

SEQ ID NO: 29186 - RNA, 21 nt, synthetic construct
  source 1..21: mol_type = other RNA; note = Description of Artificial Sequence: Synthetic oligonucleotide
ttcacagttagtgaagtcgtt

SEQ ID NO: 29187 - RNA, 21 nt, synthetic construct
  source 1..21: mol_type = other RNA; note = Description of Artificial Sequence: Synthetic oligonucleotide
tgtcacagttagtgaagtctt

SEQ ID NO: 29188 - RNA, 21 nt, synthetic construct
  source 1..21: mol_type = other RNA; note = Description of Artificial Sequence: Synthetic oligonucleotide
tagtcacagttagtgaagttt

SEQ ID NO: 29189 - RNA, 21 nt, synthetic construct
  source 1..21: mol_type = other RNA; note = Description of Artificial Sequence: Synthetic oligonucleotide
taagtcacagttagtgaagtt

SEQ ID NO: 29190 - RNA, 21 nt, synthetic construct
  source 1..21: mol_type = other RNA; note = Description of Artificial Sequence: Synthetic oligonucleotide
taaagtcacagttagtgaatt

SEQ ID NO: 29191 - RNA, 21 nt, synthetic construct
  source 1..21: mol_type = other RNA; note = Description of Artificial Sequence: Synthetic oligonucleotide
tcaaagtcacagttagtgatt

SEQ ID NO: 29192 - RNA, 21 nt, synthetic construct
  source 1..21: mol_type = other RNA; note = Description of Artificial Sequence: Synthetic oligonucleotide
ttcaaagtcacagttagtgtt

SEQ ID NO: 29193 - RNA, 21 nt, synthetic construct
  source 1..21: mol_type = other RNA; note = Description of Artificial Sequence: Synthetic oligonucleotide
tctcaaagtcacagttagttt

SEQ ID NO: 29194 - RNA, 21 nt, synthetic construct
  source 1..21: mol_type = other RNA; note = Description of Artificial Sequence: Synthetic oligonucleotide
ttctcaaagtcacagttagtt

SEQ ID NO: 29195 - RNA, 21 nt, synthetic construct
  source 1..21: mol_type = other RNA; note = Description of Artificial Sequence: Synthetic oligonucleotide
tttctcaaagtcacagttatt

SEQ ID NO: 29196 - RNA, 21 nt, synthetic construct
  source 1..21: mol_type = other RNA; note = Description of Artificial Sequence: Synthetic oligonucleotide
tcttctcaaagtcacagtttt

SEQ ID NO: 29197 - RNA, 21 nt, synthetic construct
  source 1..21: mol_type = other RNA; note = Description of Artificial Sequence: Synthetic oligonucleotide
ttcttctcaaagtcacagttt

SEQ ID NO: 29198 - RNA, 21 nt, synthetic construct
  source 1..21: mol_type = other RNA; note = Description of Artificial Sequence: Synthetic oligonucleotide
tatcttctcaaagtcacagtt

SEQ ID NO: 29199 - RNA, 21 nt, synthetic construct
  source 1..21: mol_type = other RNA; note = Description of Artificial Sequence: Synthetic oligonucleotide
taatcttctcaaagtcacatt

SEQ ID NO: 29200 - RNA, 21 nt, synthetic construct
  source 1..21: mol_type = other RNA; note = Description of Artificial Sequence: Synthetic oligonucleotide
ttaatcttctcaaagtcactt

SEQ ID NO: 29201 - RNA, 21 nt, synthetic construct
  source 1..21: mol_type = other RNA; note = Description of Artificial Sequence: Synthetic oligonucleotide
tttaatcttctcaaagtcatt

SEQ ID NO: 29202 - RNA, 21 nt, synthetic construct
  source 1..21: mol_type = other RNA; note = Description of Artificial Sequence: Synthetic oligonucleotide
ttttaatcttctcaaagtctt

SEQ ID NO: 29203 - RNA, 21 nt, synthetic construct
  source 1..21: mol_type = other RNA; note = Description of Artificial Sequence: Synthetic oligonucleotide
tctttaatcttctcaaagttt

SEQ ID NO: 29204 - RNA, 21 nt, synthetic construct
  source 1..21: mol_type = other RNA; note = Description of Artificial Sequence: Synthetic oligonucleotide
tgctttaatcttctcaaagtt

SEQ ID NO: 29205 - RNA, 21 nt, synthetic construct
  source 1..21: mol_type = other RNA; note = Description of Artificial Sequence: Synthetic oligonucleotide
ttgctttaatcttctcaaatt

SEQ ID NO: 29206 - RNA, 21 nt, synthetic construct
  source 1..21: mol_type = other RNA; note = Description of Artificial Sequence: Synthetic oligonucleotide
tctgctttaatcttctcaatt

SEQ ID NO: 29207 - RNA, 21 nt, synthetic construct
  source 1..21: mol_type = other RNA; note = Description of Artificial Sequence: Synthetic oligonucleotide
tgctgctttaatcttctcatt

SEQ ID NO: 29208 - RNA, 21 nt, synthetic construct
  source 1..21: mol_type = other RNA; note = Description of Artificial Sequence: Synthetic oligonucleotide
tggctgctttaatcttctctt

SEQ ID NO: 29209 - RNA, 21 nt, synthetic construct
  source 1..21: mol_type = other RNA; note = Description of Artificial Sequence: Synthetic oligonucleotide
taggctgctttaatcttcttt

SEQ ID NO: 29210 - RNA, 21 nt, synthetic construct
  source 1..21: mol_type = other RNA; note = Description of Artificial Sequence: Synthetic oligonucleotide
ttaggctgctttaatcttctt

SEQ ID NO: 29211 - RNA, 21 nt, synthetic construct
  source 1..21: mol_type = other RNA; note = Description of Artificial Sequence: Synthetic oligonucleotide
tataggctgctttaatctttt

SEQ ID NO: 29212 - RNA, 21 nt, synthetic construct
  source 1..21: mol_type = other RNA; note = Description of Artificial Sequence: Synthetic oligonucleotide
tgataggctgctttaatcttt

SEQ ID NO: 29213 - RNA, 21 nt, synthetic construct
  source 1..21: mol_type = other RNA; note = Description of Artificial Sequence: Synthetic oligonucleotide
tagataggctgctttaatctt

SEQ ID NO: 29214 - RNA, 21 nt, synthetic construct
  source 1..21: mol_type = other RNA; note = Description of Artificial Sequence: Synthetic oligonucleotide
tgagataggctgctttaattt

SEQ ID NO: 29215 - RNA, 21 nt, synthetic construct
  source 1..21: mol_type = other RNA; note = Description of Artificial Sequence: Synthetic oligonucleotide
ttgagataggctgctttaatt

SEQ ID NO: 29216 - RNA, 21 nt, synthetic construct
  source 1..21: mol_type = other RNA; note = Description of Artificial Sequence: Synthetic oligonucleotide
tctgagataggctgctttatt

SEQ ID NO: 29217 - RNA, 21 nt, synthetic construct
  source 1..21: mol_type = other RNA; note = Description of Artificial Sequence: Synthetic oligonucleotide
tactgagataggctgcttttt

SEQ ID NO: 29218 - RNA, 21 nt, synthetic construct
  source 1..21: mol_type = other RNA; note = Description of Artificial Sequence: Synthetic oligonucleotide
ttactgagataggctgctttt

SEQ ID NO: 29219 - RNA, 21 nt, synthetic construct
  source 1..21: mol_type = other RNA; note = Description of Artificial Sequence: Synthetic oligonucleotide
tgtactgagataggctgcttt

SEQ ID NO: 29220 - RNA, 21 nt, synthetic construct
  source 1..21: mol_type = other RNA; note = Description of Artificial Sequence: Synthetic oligonucleotide
tagtactgagataggctgctt

SEQ ID NO: 29221 - RNA, 21 nt, synthetic construct
  source 1..21: mol_type = other RNA; note = Description of Artificial Sequence: Synthetic oligonucleotide
ttagtactgagataggctgtt

SEQ ID NO: 29222 - RNA, 21 nt, synthetic construct
  source 1..21: mol_type = other RNA; note = Description of Artificial Sequence: Synthetic oligonucleotide
tatagtactgagataggcttt

SEQ ID NO: 29223 - RNA, 21 nt, synthetic construct
  source 1..21: mol_type = other RNA; note = Description of Artificial Sequence: Synthetic oligonucleotide
taatagtactgagataggctt

SEQ ID NO: 29224 - RNA, 21 nt, synthetic construct
  source 1..21: mol_type = other RNA; note = Description of Artificial Sequence: Synthetic oligonucleotide
taaatagtactgagataggtt

SEQ ID NO: 29225 - RNA, 21 nt, synthetic construct
  source 1..21: mol_type = other RNA; note = Description of Artificial Sequence: Synthetic oligonucleotide
tgaaatagtactgagatagtt

SEQ ID NO: 29226 - RNA, 21 nt, synthetic construct
  source 1..21: mol_type = other RNA; note = Description of Artificial Sequence: Synthetic oligonucleotide
tagaaatagtactgagatatt

SEQ ID NO: 29227 - RNA, 21 nt, synthetic construct
  source 1..21: mol_type = other RNA; note = Description of Artificial Sequence: Synthetic oligonucleotide
ttagaaatagtactgagattt

SEQ ID NO: 29228 - RNA, 21 nt, synthetic construct
  source 1..21: mol_type = other RNA; note = Description of Artificial Sequence: Synthetic oligonucleotide
tttagaaatagtactgagatt

SEQ ID NO: 29229 - RNA, 21 nt, synthetic construct
  source 1..21: mol_type = other RNA; note = Description of Artificial Sequence: Synthetic oligonucleotide
ttttagaaatagtactgagtt

SEQ ID NO: 29230 - RNA, 21 nt, synthetic construct
  source 1..21: mol_type = other RNA; note = Description of Artificial Sequence: Synthetic oligonucleotide
tctttagaaatagtactgatt

SEQ ID NO: 29231 - RNA, 21 nt, synthetic construct
  source 1..21: mol_type = other RNA; note = Description of Artificial Sequence: Synthetic oligonucleotide
ttctttagaaatagtactgtt

SEQ ID NO: 29232 - RNA, 21 nt, synthetic construct
  source 1..21: mol_type = other RNA; note = Description of Artificial Sequence: Synthetic oligonucleotide
tgtctttagaaatagtacttt

SEQ ID NO: 29233 - RNA, 21 nt, synthetic construct
  source 1..21: mol_type = other RNA; note = Description of Artificial Sequence: Synthetic oligonucleotide
tggtctttagaaatagtactt

SEQ ID NO: 29234 - RNA, 21 nt, synthetic construct
  source 1..21: mol_type = other RNA; note = Description of Artificial Sequence: Synthetic oligonucleotide
taggtctttagaaatagtatt

SEQ ID NO: 29235 - RNA, 21 nt, synthetic construct
  source 1..21: mol_type = other RNA; note = Description of Artificial Sequence: Synthetic oligonucleotide
tcaggtctttagaaatagttt

SEQ ID NO: 29236 - RNA, 21 nt, synthetic construct
  source 1..21: mol_type = other RNA; note = Description of Artificial Sequence: Synthetic oligonucleotide
ttcaggtctttagaaatagtt

SEQ ID NO: 29237 - RNA, 21 nt, synthetic construct
  source 1..21: mol_type = other RNA; note = Description of Artificial Sequence: Synthetic oligonucleotide
tatcaggtctttagaaatatt

SEQ ID NO: 29238 - RNA, 21 nt, synthetic construct
  source 1..21: mol_type = other RNA; note = Description of Artificial Sequence: Synthetic oligonucleotide
taatcaggtctttagaaattt

SEQ ID NO: 29239 - RNA, 21 nt, synthetic construct
  source 1..21: mol_type = other RNA; note = Description of Artificial Sequence: Synthetic oligonucleotide
ttaatcaggtctttagaaatt

SEQ ID NO: 29240 - RNA, 21 nt, synthetic construct
  source 1..21: mol_type = other RNA; note = Description of Artificial Sequence: Synthetic oligonucleotide
tgtaatcaggtctttagaatt

SEQ ID NO: 29241 - RNA, 21 nt, synthetic construct
  source 1..21: mol_type = other RNA; note = Description of Artificial Sequence: Synthetic oligonucleotide
ttgtaatcaggtctttagatt

SEQ ID NO: 29242 - RNA, 21 nt, synthetic construct
  source 1..21: mol_type = other RNA; note = Description of Artificial Sequence: Synthetic oligonucleotide
tatgtaatcaggtctttagtt

SEQ ID NO: 29243 - RNA, 21 nt, synthetic construct
  source 1..21: mol_type = other RNA; note = Description of Artificial Sequence: Synthetic oligonucleotide
ttatgtaatcaggtctttatt

SEQ ID NO: 29244 - RNA, 21 nt, synthetic construct
  source 1..21: mol_type = other RNA; note = Description of Artificial Sequence: Synthetic oligonucleotide
tatatgtaatcaggtcttttt

SEQ ID NO: 29245 - RNA, 21 nt, synthetic construct
  source 1..21: mol_type = other RNA; note = Description of Artificial Sequence: Synthetic oligonucleotide
ttatatgtaatcaggtctttt

SEQ ID NO: 29246 - RNA, 21 nt, synthetic construct
  source 1..21: mol_type = other RNA; note = Description of Artificial Sequence: Synthetic oligonucleotide
tatatatgtaatcaggtcttt

SEQ ID NO: 29247 - RNA, 21 nt, synthetic construct
  source 1..21: mol_type = other RNA; note = Description of Artificial Sequence: Synthetic oligonucleotide
tcatatatgtaatcaggtctt

SEQ ID NO: 29248 - RNA, 21 nt, synthetic construct
  source 1..21: mol_type = other RNA; note = Description of Artificial Sequence: Synthetic oligonucleotide
ttcatatatgtaatcaggttt

SEQ ID NO: 29249 - RNA, 21 nt, synthetic construct
  source 1..21: mol_type = other RNA; note = Description of Artificial Sequence: Synthetic oligonucleotide
tctcatatatgtaatcaggtt

SEQ ID NO: 29250 - RNA, 21 nt, synthetic construct
  source 1..21: mol_type = other RNA; note = Description of Artificial Sequence: Synthetic oligonucleotide
tactcatatatgtaatcagtt

SEQ ID NO: 29251 - RNA, 21 nt, synthetic construct
  source 1..21: mol_type = other RNA; note = Description of Artificial Sequence: Synthetic oligonucleotide
tcactcatatatgtaatcatt

SEQ ID NO: 29252 - RNA, 21 nt, synthetic construct
  source 1..21: mol_type = other RNA; note = Description of Artificial Sequence: Synthetic oligonucleotide
tccactcatatatgtaatctt

SEQ ID NO: 29253 - RNA, 21 nt, synthetic construct
  source 1..21: mol_type = other RNA; note = Description of Artificial Sequence: Synthetic oligonucleotide
tcccactcatatatgtaattt

SEQ ID NO: 29254 - RNA, 21 nt, synthetic construct
  source 1..21: mol_type = other RNA; note = Description of Artificial Sequence: Synthetic oligonucleotide
ttcccactcatatatgtaatt

SEQ ID NO: 29255 - RNA, 21 nt, synthetic construct
  source 1..21: mol_type = other RNA; note = Description of Artificial Sequence: Synthetic oligonucleotide
tgtcccactcatatatgtatt

SEQ ID NO: 29256 - RNA, 21 nt, synthetic construct
  source 1..21: mol_type = other RNA; note = Description of Artificial Sequence: Synthetic oligonucleotide
tggtcccactcatatatgttt

SEQ ID NO: 29257 - RNA, 21 nt, synthetic construct
  source 1..21: mol_type = other RNA; note = Description of Artificial Sequence: Synthetic oligonucleotide
ttggtcccactcatatatgtt

SEQ ID NO: 29258 - RNA, 21 nt, synthetic construct
  source 1..21: mol_type = other RNA; note = Description of Artificial Sequence: Synthetic oligonucleotide
tttggtcccactcatatattt

SEQ ID NO: 29259 - RNA, 21 nt, synthetic construct
  source 1..21: mol_type = other RNA; note = Description of Artificial Sequence: Synthetic oligonucleotide
ttttggtcccactcatatatt

SEQ ID NO: 29260 - RNA, 21 nt, synthetic construct
  source 1..21: mol_type = other RNA; note = Description of Artificial Sequence: Synthetic oligonucleotide
tttttggtcccactcatattt

SEQ ID NO: 29261 - RNA, 21 nt, synthetic construct
  source 1..21: mol_type = other RNA; note = Description of Artificial Sequence: Synthetic oligonucleotide
tcttttggtcccactcatatt

SEQ ID NO: 29262 - RNA, 21 nt, synthetic construct
  source 1..21: mol_type = other RNA; note = Description of Artificial Sequence: Synthetic oligonucleotide
tacttttggtcccactcattt

SEQ ID NO: 29263 - RNA, 21 nt, synthetic construct
  source 1..21: mol_type = other RNA; note = Description of Artificial Sequence: Synthetic oligonucleotide
ttacttttggtcccactcatt

SEQ ID NO: 29264 - RNA, 21 nt, synthetic construct
  source 1..21: mol_type = other RNA; note = Description of Artificial Sequence: Synthetic oligonucleotide
tgtacttttggtcccactctt

SEQ ID NO: 29265 - RNA, 21 nt, synthetic construct
  source 1..21: mol_type = other RNA; note = Description of Artificial Sequence: Synthetic oligonucleotide
tggtacttttggtcccacttt

SEQ ID NO: 29266 - RNA, 21 nt, synthetic construct
  source 1..21: mol_type = other RNA; note = Description of Artificial Sequence: Synthetic oligonucleotide
tcggtacttttggtcccactt

SEQ ID NO: 29267 - RNA, 21 nt, synthetic construct
  source 1..21: mol_type = other RNA; note = Description of Artificial Sequence: Synthetic oligonucleotide
ttcggtacttttggtcccatt

SEQ ID NO: 29268 - RNA, 21 nt, synthetic construct
  source 1..21: mol_type = other RNA; note = Description of Artificial Sequence: Synthetic oligonucleotide
tctcggtacttttggtccctt

SEQ ID NO: 29269 - RNA, 21 nt, synthetic construct
  source 1..21: mol_type = other RNA; note = Description of Artificial Sequence: Synthetic oligonucleotide
tactcggtacttttggtcctt

SEQ ID NO: 29270 - RNA, 21 nt, synthetic construct
  source 1..21: mol_type = other RNA; note = Description of Artificial Sequence: Synthetic oligonucleotide
taactcggtacttttggtctt

SEQ ID NO: 29271 - RNA, 21 nt, synthetic construct
  source 1..21: mol_type = other RNA; note = Description of Artificial Sequence: Synthetic oligonucleotide
tgaactcggtacttttggttt

SEQ ID NO: 29272 - RNA, 21 nt, synthetic construct
  source 1..21: mol_type = other RNA; note = Description of Artificial Sequence: Synthetic oligonucleotide
ttgaactcggtacttttggtt

SEQ ID NO: 29273 - RNA, 21 nt, synthetic construct
  source 1..21: mol_type = other RNA; note = Description of Artificial Sequence: Synthetic oligonucleotide
tttgaactcggtacttttgtt

SEQ ID NO: 29274 - RNA, 21 nt, synthetic construct
  source 1..21: mol_type = other RNA; note = Description of Artificial Sequence: Synthetic oligonucleotide
tgttgaactcggtactttttt

SEQ ID NO: 29275 - RNA, 21 nt, synthetic construct
  source 1..21: mol_type = other RNA; note = Description of Artificial Sequence: Synthetic oligonucleotide
ttgttgaactcggtacttttt

SEQ ID NO: 29276 - RNA, 21 nt, synthetic construct
  source 1..21: mol_type = other RNA; note = Description of Artificial Sequence: Synthetic oligonucleotide
tttgttgaactcggtactttt

SEQ ID NO: 29277 - RNA, 21 nt, synthetic construct
  source 1..21: mol_type = other RNA; note = Description of Artificial Sequence: Synthetic oligonucleotide
tgttgttgaactcggtacttt

SEQ ID NO: 29278 - RNA, 21 nt, synthetic construct
  source 1..21: mol_type = other RNA; note = Description of Artificial Sequence: Synthetic oligonucleotide
ttgttgttgaactcggtactt

SEQ ID NO: 29279 - RNA, 21 nt, synthetic construct
  source 1..21: mol_type = other RNA; note = Description of Artificial Sequence: Synthetic oligonucleotide
tgtgttgttgaactcggtatt

SEQ ID NO: 29280 - RNA, 21 nt, synthetic construct
  source 1..21: mol_type = other RNA; note = Description of Artificial Sequence: Synthetic oligonucleotide
tggtgttgttgaactcggttt

SEQ ID NO: 29281 - RNA, 21 nt, synthetic construct
  source 1..21: mol_type = other RNA; note = Description of Artificial Sequence: Synthetic oligonucleotide
tcggtgttgttgaactcggtt

SEQ ID NO: 29282 - RNA, 21 nt, synthetic construct
  source 1..21: mol_type = other RNA; note = Description of Artificial Sequence: Synthetic oligonucleotide
tacggtgttgttgaactcgtt

SEQ ID NO: 29283 - RNA, 21 nt, synthetic construct
  source 1..21: mol_type = other RNA; note = Description of Artificial Sequence: Synthetic oligonucleotide
tgacggtgttgttgaactctt

SEQ ID NO: 29284 - RNA, 21 nt, synthetic construct
  source 1..21: mol_type = other RNA; note = Description of Artificial Sequence: Synthetic oligonucleotide
tagacggtgttgttgaacttt

SEQ ID NO: 29285 - RNA, 21 nt, synthetic construct
  source 1..21: mol_type = other RNA; note = Description of Artificial Sequence: Synthetic oligonucleotide
tgagacggtgttgttgaactt

SEQ ID NO: 29286 - RNA, 21 nt, synthetic construct
  source 1..21: mol_type = other RNA; note = Description of Artificial Sequence: Synthetic oligonucleotide
tagagacggtgttgttgaatt

SEQ ID NO: 29287 - RNA, 21 nt, synthetic construct
  source 1..21: mol_type = other RNA; note = Description of Artificial Sequence: Synthetic oligonucleotide
taagagacggtgttgttgatt

SEQ ID NO: 29288 - RNA, 21 nt, synthetic construct
  source 1..21: mol_type = other RNA; note = Description of Artificial Sequence: Synthetic oligonucleotide
tcaagagacggtgttgttgtt

SEQ ID NO: 29289 - RNA, 21 nt, synthetic construct
  source 1..21: mol_type = other RNA; note = Description of Artificial Sequence: Synthetic oligonucleotide
tacaagagacggtgttgtttt

SEQ ID NO: 29290 - RNA, 21 nt, synthetic construct
  source 1..21: mol_type = other RNA; note = Description of Artificial Sequence: Synthetic oligonucleotide
ttacaagagacggtgttgttt

SEQ ID NO: 29291 - RNA, 21 nt, synthetic construct
  source 1..21: mol_type = other RNA; note = Description of Artificial Sequence: Synthetic oligonucleotide
tctacaagagacggtgttgtt

SEQ ID NO: 29292 - RNA, 21 nt, synthetic construct
  source 1..21: mol_type = other RNA; note = Description of Artificial Sequence: Synthetic oligonucleotide
tgctacaagagacggtgtttt

SEQ ID NO: 29293 - RNA, 21 nt, synthetic construct
  source 1..21: mol_type = other RNA; note = Description of Artificial Sequence: Synthetic oligonucleotide
ttgctacaagagacggtgttt

SEQ ID NO: 29294 - RNA, 21 nt, synthetic construct
  source 1..21: mol_type = other RNA; note = Description of Artificial Sequence: Synthetic oligonucleotide
tttgctacaagagacggtgtt

SEQ ID NO: 29295 - RNA, 21 nt, synthetic construct
  source 1..21: mol_type = other RNA; note = Description of Artificial Sequence: Synthetic oligonucleotide
tattgctacaagagacggttt

SEQ ID NO: 29296 - RNA, 21 nt, synthetic construct
  source 1..21: mol_type = other RNA; note = Description of Artificial Sequence: Synthetic oligonucleotide
tgattgctacaagagacggtt

SEQ ID NO: 29297 - RNA, 21 nt, synthetic construct
  source 1..21: mol_type = other RNA; note = Description of Artificial Sequence: Synthetic oligonucleotide
tcgattgctacaagagacgtt

SEQ ID NO: 29298 - RNA, 21 nt, synthetic construct
  source 1..21: mol_type = other RNA; note = Description of Artificial Sequence: Synthetic oligonucleotide
tccgattgctacaagagactt

SEQ ID NO: 29299 - RNA, 21 nt, synthetic construct
  source 1..21: mol_type = other RNA; note = Description of Artificial Sequence: Synthetic oligonucleotide
tgccgattgctacaagagatt

SEQ ID NO: 29300 - RNA, 21 nt, synthetic construct
  source 1..21: mol_type = other RNA; note = Description of Artificial Sequence: Synthetic oligonucleotide
tggccgattgctacaagagtt

SEQ ID NO: 29301 - RNA, 21 nt, synthetic construct
  source 1..21: mol_type = other RNA; note = Description of Artificial Sequence: Synthetic oligonucleotide
ttggccgattgctacaagatt

SEQ ID NO: 29302 - RNA, 21 nt, synthetic construct
  source 1..21: mol_type = other RNA; note = Description of Artificial Sequence: Synthetic oligonucleotide
tgtggccgattgctacaagtt

SEQ ID NO: 29303 - RNA, 21 nt, synthetic construct
  source 1..21: mol_type = other RNA; note = Description of Artificial Sequence: Synthetic oligonucleotide
ttgtggccgattgctacaatt

SEQ ID NO: 29304 - RNA, 21 nt, synthetic construct
  source 1..21: mol_type = other RNA; note = Description of Artificial Sequence: Synthetic oligonucleotide
tatgtggccgattgctacatt

SEQ ID NO: 29305 - RNA, 21 nt, synthetic construct
  source 1..21: mol_type = other RNA; note = Description of Artificial Sequence: Synthetic oligonucleotide
taatgtggccgattgctactt

SEQ ID NO: 29306 - RNA, 21 nt, synthetic construct
  source 1..21: mol_type = other RNA; note = Description of Artificial Sequence: Synthetic oligonucleotide
tcaatgtggccgattgctatt

SEQ ID NO: 29307 - RNA, 21 nt, synthetic construct
  source 1..21: mol_type = other RNA; note = Description of Artificial Sequence: Synthetic oligonucleotide
tgcaatgtggccgattgcttt

SEQ ID NO: 29308 - RNA, 21 nt, synthetic construct
  source 1..21: mol_type = other RNA; note = Description of Artificial Sequence: Synthetic oligonucleotide
tggcaatgtggccgattgctt

SEQ ID NO: 29309 - RNA, 21 nt, synthetic construct
  source 1..21: mol_type = other RNA; note = Description of Artificial Sequence: Synthetic oligonucleotide
taggcaatgtggccgattgtt

SEQ ID NO: 29310 - RNA, 21 nt, synthetic construct
  source 1..21: mol_type = other RNA; note = Description of Artificial Sequence: Synthetic oligonucleotide
taaggcaatgtggccgatttt

SEQ ID NO: 29311 - RNA, 21 nt, synthetic construct
  source 1..21: mol_type = other RNA; note = Description of Artificial Sequence: Synthetic oligonucleotide
ttaaggcaatgtggccgattt

SEQ ID NO: 29312 - RNA, 21 nt, synthetic construct
  source 1..21: mol_type = other RNA; note = Description of Artificial Sequence: Synthetic oligonucleotide
tgtaaggcaatgtggccgatt

SEQ ID NO: 29313 - RNA, 21 nt, synthetic construct
  source 1..21: mol_type = other RNA; note = Description of Artificial Sequence: Synthetic oligonucleotide
tagtaaggcaatgtggccgtt

SEQ ID NO: 29314 - RNA, 21 nt, synthetic construct
  source 1..21: mol_type = other RNA; note = Description of Artificial Sequence: Synthetic oligonucleotide
tcagtaaggcaatgtggcctt

SEQ ID NO: 29315 - RNA, 21 nt, synthetic construct
  source 1..21: mol_type = other RNA; note = Description of Artificial Sequence: Synthetic oligonucleotide
ttcagtaaggcaatgtggctt

SEQ ID NO: 29316 - RNA, 21 nt, synthetic construct
  source 1..21: mol_type = other RNA; note = Description of Artificial Sequence: Synthetic oligonucleotide
tttcagtaaggcaatgtggtt

SEQ ID NO: 29317 - RNA, 21 nt, synthetic construct
  source 1..21: mol_type = other RNA; note = Description of Artificial Sequence: Synthetic oligonucleotide
ttttcagtaaggcaatgtgtt

SEQ ID NO: 29318 - RNA, 21 nt, synthetic construct
  source 1..21: mol_type = other RNA; note = Description of Artificial Sequence: Synthetic oligonucleotide
tatttcagtaaggcaatgttt

SEQ ID NO: 29319 - RNA, 21 nt, synthetic construct
  source 1..21: mol_type = other RNA; note = Description of Artificial Sequence: Synthetic oligonucleotide
tgatttcagtaaggcaatgtt

SEQ ID NO: 29320 - RNA, 21 nt, synthetic construct
  source 1..21: mol_type = other RNA; note = Description of Artificial Sequence: Synthetic oligonucleotide
tggatttcagtaaggcaattt

SEQ ID NO: 29321 - RNA, 21 nt, synthetic construct
  source 1..21: mol_type = other RNA; note = Description of Artificial Sequence: Synthetic oligonucleotide
ttggatttcagtaaggcaatt

SEQ ID NO: 29322 - RNA, 21 nt, synthetic construct
  source 1..21: mol_type = other RNA; note = Description of Artificial Sequence: Synthetic oligonucleotide
tctggatttcagtaaggcatt

SEQ ID NO: 29323 - RNA, 21 nt, synthetic construct
  source 1..21: mol_type = other RNA; note = Description of Artificial Sequence: Synthetic oligonucleotide
ttctggatttcagtaaggctt

SEQ ID NO: 29324 - RNA, 21 nt, synthetic construct
  source 1..21: mol_type = other RNA; note = Description of Artificial Sequence: Synthetic oligonucleotide
tctctggatttcagtaaggtt

SEQ ID NO: 29325 - RNA, 21 nt, synthetic construct
  source 1..21: mol_type = other RNA; note = Description of Artificial Sequence: Synthetic oligonucleotide
tgctctggatttcagtaagtt

SEQ ID NO: 29326 - RNA, 21 nt, synthetic construct
  source 1..21: mol_type = other RNA; note = Description of Artificial Sequence: Synthetic oligonucleotide
tggctctggatttcagtaatt

SEQ ID NO: 29327 - RNA, 21 nt, synthetic construct
  source 1..21: mol_type = other RNA; note = Description of Artificial Sequence: Synthetic oligonucleotide
taggctctggatttcagtatt

SEQ ID NO: 29328 - RNA, 21 nt, synthetic construct
  source 1..21: mol_type = other RNA; note = Description of Artificial Sequence: Synthetic oligonucleotide
ttaggctctggatttcagttt

SEQ ID NO: 29329 - RNA, 21 nt, synthetic construct
  source 1..21: mol_type = other RNA; note = Description of Artificial Sequence: Synthetic oligonucleotide
tttaggctctggatttcagtt

SEQ ID NO: 29330 - RNA, 21 nt, synthetic construct
  source 1..21: mol_type = other RNA; note = Description of Artificial Sequence: Synthetic oligonucleotide
tgttaggctctggatttcatt

SEQ ID NO: 29331 - RNA, 21 nt, synthetic construct
  source 1..21: mol_type = other RNA; note = Description of Artificial Sequence: Synthetic oligonucleotide
tggttaggctctggatttctt

SEQ ID NO: 29332 - RNA, 21 nt, synthetic construct
  source 1..21: mol_type = other RNA; note = Description of Artificial Sequence: Synthetic oligonucleotide
taggttaggctctggattttt

SEQ ID NO: 29333 - RNA, 21 nt, synthetic construct
  source 1..21: mol_type = other RNA; note = Description of Artificial Sequence: Synthetic oligonucleotide
taaggttaggctctggatttt

SEQ ID NO: 29334 - RNA, 21 nt, synthetic construct
  source 1..21: mol_type = other RNA; note = Description of Artificial Sequence: Synthetic oligonucleotide
tgaaggttaggctctggattt

SEQ ID NO: 29335 - RNA, 21 nt, synthetic construct
  source 1..21: mol_type = other RNA; note = Description of Artificial Sequence: Synthetic oligonucleotide
ttgaaggttaggctctggatt

SEQ ID NO: 29336 - RNA, 21 nt, synthetic construct
  source 1..21: mol_type = other RNA; note = Description of Artificial Sequence: Synthetic oligonucleotide
tttgaaggttaggctctggtt

SEQ ID NO: 29337 - RNA, 21 nt, synthetic construct
  source 1..21: mol_type = other RNA; note = Description of Artificial Sequence: Synthetic oligonucleotide
tattgaaggttaggctctgtt

SEQ ID NO: 29338 - RNA, 21 nt, synthetic construct
  source 1..21: mol_type = other RNA; note = Description of Artificial Sequence: Synthetic oligonucleotide
tgattgaaggttaggctcttt

SEQ ID NO: 29339 - RNA, 21 nt, synthetic construct
  source 1..21: mol_type = other RNA; note = Description of Artificial Sequence: Synthetic oligonucleotide
tggattgaaggttaggctctt

SEQ ID NO: 29340 - RNA, 21 nt, synthetic construct
  source 1..21: mol_type = other RNA; note = Description of Artificial Sequence: Synthetic oligonucleotide
tgggattgaaggttaggcttt

SEQ ID NO: 29341 - RNA, 21 nt, synthetic construct
  source 1..21: mol_type = other RNA; note = Description of Artificial Sequence: Synthetic oligonucleotide
ttgggattgaaggttaggctt

SEQ ID NO: 29342 - RNA, 21 nt, synthetic construct
  source 1..21: mol_type = other RNA; note = Description of Artificial Sequence: Synthetic oligonucleotide
tgtgggattgaaggttaggtt

SEQ ID NO: 29343 - RNA, 21 nt, synthetic construct
  source 1..21: mol_type = other RNA; note = Description of Artificial Sequence: Synthetic oligonucleotide
tggtgggattgaaggttagtt

SEQ ID NO: 29344 - RNA, 21 nt, synthetic construct
  source 1..21: mol_type = other RNA; note = Description of Artificial Sequence: Synthetic oligonucleotide
tcggtgggattgaaggttatt

SEQ ID NO: 29345 - RNA, 21 nt, synthetic construct
  source 1..21: mol_type = other RNA; note = Description of Artificial Sequence: Synthetic oligonucleotide
tgcggtgggattgaaggtttt

SEQ ID NO: 29346 - RNA, 21 nt, synthetic construct
  source 1..21: mol_type = other RNA; note = Description of Artificial Sequence: Synthetic oligonucleotide
tggcggtgggattgaaggttt

SEQ ID NO: 29347 - RNA, 21 nt, synthetic construct
  source 1..21: mol_type = other RNA; note = Description of Artificial Sequence: Synthetic oligonucleotide
tcggcggtgggattgaaggtt

SEQ ID NO: 29348 - RNA, 21 nt, synthetic construct
  source 1..21: mol_type = other RNA; note = Description of Artificial Sequence: Synthetic oligonucleotide
tccggcggtgggattgaagtt

SEQ ID NO: 29349 - RNA, 21 nt, synthetic construct
  source 1..21: mol_type = other RNA; note = Description of Artificial Sequence: Synthetic oligonucleotide
tgccggcggtgggattgaatt

SEQ ID NO: 29350 - RNA, 21 nt, synthetic construct
  source 1..21: mol_type = other RNA; note = Description of Artificial Sequence: Synthetic oligonucleotide
tagccggcggtgggattgatt

SEQ ID NO: 29351 - RNA, 21 nt, synthetic construct
  source 1..21: mol_type = other RNA; note = Description of Artificial Sequence: Synthetic oligonucleotide
tcagccggcggtgggattgtt

SEQ ID NO: 29352 - RNA, 21 nt, synthetic construct
  source 1..21: mol_type = other RNA; note = Description of Artificial Sequence: Synthetic oligonucleotide
tgcagccggcggtgggatttt

SEQ ID NO: 29353 - RNA, 21 nt, synthetic construct
  source 1..21: mol_type = other RNA; note = Description of Artificial Sequence: Synthetic oligonucleotide
tcgcagccggcggtgggattt

SEQ ID NO: 29354 - RNA, 21 nt, synthetic construct
  source 1..21: mol_type = other RNA; note = Description of Artificial Sequence: Synthetic oligonucleotide
tgcgcagccggcggtgggatt

SEQ ID NO: 29355 - RNA, 21 nt, synthetic construct
  source 1..21: mol_type = other RNA; note = Description of Artificial Sequence: Synthetic oligonucleotide
tcgcgcagccggcggtgggtt

SEQ ID NO: 29356 - RNA, 21 nt, synthetic construct
  source 1..21: mol_type = other RNA; note = Description of Artificial Sequence: Synthetic oligonucleotide
tacgcgcagccggcggtggtt

SEQ ID NO: 29357 - RNA, 21 nt, synthetic construct
  source 1..21: mol_type = other RNA; note = Description of Artificial Sequence: Synthetic oligonucleotide
tgacgcgcagccggcggtgtt

SEQ ID NO: 29358 - RNA, 21 nt, synthetic construct
  source 1..21: mol_type = other RNA; note = Description of Artificial Sequence: Synthetic oligonucleotide
tcgacgcgcagccggcggttt

SEQ ID NO: 29359 - RNA, 21 nt, synthetic construct
  source 1..21: mol_type = other RNA; note = Description of Artificial Sequence: Synthetic oligonucleotide
tgcgacgcgcagccggcggtt

SEQ ID NO: 29360 - RNA, 21 nt, synthetic construct
  source 1..21: mol_type = other RNA; note = Description of Artificial Sequence: Synthetic oligonucleotide
tagcgacgcgcagccggcgtt

SEQ ID NO: 29361 - RNA, 21 nt, synthetic construct
  source 1..21: mol_type = other RNA; note = Description of Artificial Sequence: Synthetic oligonucleotide
tgagcgacgcgcagccggctt

SEQ ID NO: 29362 - RNA, 21 nt, synthetic construct
  source 1..21: mol_type = other RNA; note = Description of Artificial Sequence: Synthetic oligonucleotide
tcgagcgacgcgcagccggtt

SEQ ID NO: 29363 - RNA, 21 nt, synthetic construct
  source 1..21: mol_type = other RNA; note = Description of Artificial Sequence: Synthetic oligonucleotide
tgcgagcgacgcgcagccgtt

SEQ ID NO: 29364 - RNA, 21 nt, synthetic construct
  source 1..21: mol_type = other RNA; note = Description of Artificial Sequence: Synthetic oligonucleotide
tggcgagcgacgcgcagcctt

SEQ ID NO: 29365 - RNA, 21 nt, synthetic construct
  source 1..21: mol_type = other RNA; note = Description of Artificial Sequence: Synthetic oligonucleotide
ttggcgagcgacgcgcagctt

SEQ ID NO: 29366 - RNA, 21 nt, synthetic construct
  source 1..21: mol_type = other RNA; note = Description of Artificial Sequence: Synthetic oligonucleotide
tttggcgagcgacgcgcagtt

SEQ ID NO: 29367 - RNA, 21 nt, synthetic construct
  source 1..21: mol_type = other RNA; note = Description of Artificial Sequence: Synthetic oligonucleotide
ttttggcgagcgacgcgcatt

SEQ ID NO: 29368 - RNA, 21 nt, synthetic construct
  source 1..21: mol_type = other RNA; note = Description of Artificial Sequence: Synthetic oligonucleotide
tctttggcgagcgacgcgctt

SEQ ID NO: 29369 - RNA, 21 nt, synthetic construct
  source 1..21: mol_type = other RNA; note = Description of Artificial Sequence: Synthetic oligonucleotide
ttctttggcgagcgacgcgtt

SEQ ID NO: 29370 - RNA, 21 nt, synthetic construct
  source 1..21: mol_type = other RNA; note = Description of Artificial Sequence: Synthetic oligonucleotide
tttctttggcgagcgacgctt

SEQ ID NO: 29371 - RNA, 21 nt, synthetic construct
  source 1..21: mol_type = other RNA; note = Description of Artificial Sequence: Synthetic oligonucleotide
ttttctttggcgagcgacgtt

SEQ ID NO: 29372 - RNA, 21 nt, synthetic construct
  source 1..21: mol_type = other RNA; note = Description of Artificial Sequence: Synthetic oligonucleotide
tatttctttggcgagcgactt

SEQ ID NO: 29373 - RNA, 21 nt, synthetic construct
  source 1..21: mol_type = other RNA; note = Description of Artificial Sequence: Synthetic oligonucleotide
tcatttctttggcgagcgatt

SEQ ID NO: 29374 - RNA, 21 nt, synthetic construct
  source 1..21: mol_type = other RNA; note = Description of Artificial Sequence: Synthetic oligonucleotide
tacatttctttggcgagcgtt

SEQ ID NO: 29375 - RNA, 21 nt, synthetic construct
  source 1..21: mol_type = other RNA; note = Description of Artificial Sequence: Synthetic oligonucleotide
taacatttctttggcgagctt

SEQ ID NO: 29376 - RNA, 21 nt, synthetic construct
  source 1..21: mol_type = other RNA; note = Description of Artificial Sequence: Synthetic oligonucleotide
tgaacatttctttggcgagtt

SEQ ID NO: 29377 - RNA, 21 nt, synthetic construct
  source 1..21: mol_type = other RNA; note = Description of Artificial Sequence: Synthetic oligonucleotide
tcgaacatttctttggcgatt

SEQ ID NO: 29378 - RNA, 21 nt, synthetic construct
  source 1..21: mol_type = other RNA; note = Description of Artificial Sequence: Synthetic oligonucleotide
tgcgaacatttctttggcgtt

SEQ ID NO: 29379 - RNA, 21 nt, synthetic construct
  source 1..21: mol_type = other RNA; note = Description of Artificial Sequence: Synthetic oligonucleotide
tggcgaacatttctttggctt

SEQ ID NO: 29380 - RNA, 21 nt, synthetic construct
  source 1..21: mol_type = other RNA; note = Description of Artificial Sequence: Synthetic oligonucleotide
ttggcgaacatttctttggtt

SEQ ID NO: 29381 - RNA, 21 nt, synthetic construct
  source 1..21: mol_type = other RNA; note = Description of Artificial Sequence: Synthetic oligonucleotide
tatggcgaacatttctttgtt

SEQ ID NO: 29382 - RNA, 21 nt, synthetic construct
  source 1..21: mol_type = other RNA; note = Description of Artificial Sequence: Synthetic oligonucleotide
tcatggcgaacatttcttttt

SEQ ID NO: 29383 - RNA, 21 nt, synthetic construct
  source 1..21: mol_type = other RNA; note = Description of Artificial Sequence: Synthetic oligonucleotide
ttcatggcgaacatttctttt

SEQ ID NO: 29384 - RNA, 21 nt, synthetic construct
  source 1..21: mol_type = other RNA; note = Description of Artificial Sequence: Synthetic oligonucleotide
tttcatggcgaacatttcttt

SEQ ID NO: 29385 - RNA, 21 nt, synthetic construct
  source 1..21: mol_type = other RNA; note = Description of Artificial Sequence: Synthetic oligonucleotide
ttttcatggcgaacatttctt

SEQ ID NO: 29386 - RNA, 21 nt, synthetic construct
  source 1..21: mol_type = other RNA; note = Description of Artificial Sequence: Synthetic oligonucleotide
tttttcatggcgaacattttt

SEQ ID NO: 29387 - RNA, 21 nt, synthetic construct
  source 1..21: mol_type = other RNA; note = Description of Artificial Sequence: Synthetic oligonucleotide
tgttttcatggcgaacatttt

SEQ ID NO: 29388 - RNA, 21 nt, synthetic construct
  source 1..21: mol_type = other RNA; note = Description of Artificial Sequence: Synthetic oligonucleotide
tagttttcatggcgaacattt

SEQ ID NO: 29389 - RNA, 21 nt, synthetic construct
  source 1..21: mol_type = other RNA; note = Description of Artificial Sequence: Synthetic oligonucleotide
ttagttttcatggcgaacatt

SEQ ID NO: 29390 - RNA, 21 nt, synthetic construct
  source 1..21: mol_type = other RNA; note = Description of Artificial Sequence: Synthetic oligonucleotide
tttagttttcatggcgaactt

SEQ ID NO: 29391 - RNA, 21 nt, synthetic construct
  source 1..21: mol_type = other RNA; note = Description of Artificial Sequence: Synthetic oligonucleotide
tcttagttttcatggcgaatt

SEQ ID NO: 29392 - RNA, 21 nt, synthetic construct
  source 1..21: mol_type = other RNA; note = Description of Artificial Sequence: Synthetic oligonucleotide
tccttagttttcatggcgatt

SEQ ID NO: 29393 - RNA, 21 nt, synthetic construct
  source 1..21: mol_type = other RNA; note = Description of Artificial Sequence: Synthetic oligonucleotide
tgccttagttttcatggcgtt

SEQ ID NO: 29394 - RNA, 21 nt, synthetic construct
  source 1..21: mol_type = other RNA; note = Description of Artificial Sequence: Synthetic oligonucleotide
tagccttagttttcatggctt

SEQ ID NO: 29395 - RNA, 21 nt, synthetic construct
  source 1..21: mol_type = other RNA; note = Description of Artificial Sequence: Synthetic oligonucleotide
tcagccttagttttcatggtt

SEQ ID NO: 29396 - RNA, 21 nt, synthetic construct
  source 1..21: mol_type = other RNA; note = Description of Artificial Sequence: Synthetic oligonucleotide
tgcagccttagttttcatgtt

SEQ ID NO: 29397 - RNA, 21 nt, synthetic construct
  source 1..21: mol_type = other RNA; note = Description of Artificial Sequence: Synthetic oligonucleotide
tggcagccttagttttcattt

SEQ ID NO: 29398 - RNA, 21 nt, synthetic construct
  source 1..21: mol_type = other RNA; note = Description of Artificial Sequence: Synthetic oligonucleotide
taggcagccttagttttcatt

SEQ ID NO: 29399 - RNA, 21 nt, synthetic construct
  source 1..21: mol_type = other RNA; note = Description of Artificial Sequence: Synthetic oligonucleotide
taaggcagccttagttttctt

SEQ ID NO: 29400 - RNA, 21 nt, synthetic construct
  source 1..21: mol_type = other RNA; note = Description of Artificial Sequence: Synthetic oligonucleotide
ttaaggcagccttagtttttt

SEQ ID NO: 29401 - RNA, 21 nt, synthetic construct
  source 1..21: mol_type = other RNA; note = Description of Artificial Sequence: Synthetic oligonucleotide
tctaaggcagccttagttttt

SEQ ID NO: 29402 - RNA, 21 nt, synthetic construct
  source 1..21: mol_type = other RNA; note = Description of Artificial Sequence: Synthetic oligonucleotide
tgctaaggcagccttagtttt

SEQ ID NO: 29403 - RNA, 21 nt, synthetic construct
  source 1..21: mol_type = other RNA; note = Description of Artificial Sequence: Synthetic oligonucleotide
tagctaaggcagccttagttt

SEQ ID NO: 29404 - RNA, 21 nt, synthetic construct
  source 1..21: mol_type = other RNA; note = Description of Artificial Sequence: Synthetic oligonucleotide
ttagctaaggcagccttagtt

SEQ ID NO: 29405 - RNA, 21 nt, synthetic construct
  source 1..21: mol_type = other RNA; note = Description of Artificial Sequence: Synthetic oligonucleotide
tatagctaaggcagccttatt

SEQ ID NO: 29406 - RNA, 21 nt, synthetic construct
  source 1..21: mol_type = other RNA; note = Description of Artificial Sequence: Synthetic oligonucleotide
tgatagctaaggcagcctttt

SEQ ID NO: 29407 - RNA, 21 nt, synthetic construct
  source 1..21: mol_type = other RNA; note = Description of Artificial Sequence: Synthetic oligonucleotide
tagatagctaaggcagccttt

SEQ ID NO: 29408 - RNA, 21 nt, synthetic construct
  source 1..21: mol_type = other RNA; note = Description of Artificial Sequence: Synthetic oligonucleotide
tcagatagctaaggcagcctt

SEQ ID NO: 29409 - RNA, 21 nt, synthetic construct
  source 1..21: mol_type = other RNA; note = Description of Artificial Sequence: Synthetic oligonucleotide
tccagatagctaaggcagctt

SEQ ID NO: 29410 - RNA, 21 nt, synthetic construct
  source 1..21: mol_type = other RNA; note = Description of Artificial Sequence: Synthetic oligonucleotide
taccagatagctaaggcagtt

SEQ ID NO: 29411 - RNA, 21 nt, synthetic construct
  source 1..21: mol_type = other RNA; note = Description of Artificial Sequence: Synthetic oligonucleotide
tcaccagatagctaaggcatt

SEQ ID NO: 29412 - RNA, 21 nt, synthetic construct
  source 1..21: mol_type = other RNA; note = Description of Artificial Sequence: Synthetic oligonucleotide
tgcaccagatagctaaggctt

SEQ ID NO: 29413 - RNA, 21 nt, synthetic construct
  source 1..21: mol_type = other RNA; note = Description of Artificial Sequence: Synthetic oligonucleotide
tggcaccagatagctaaggtt

SEQ ID NO: 29414 - RNA, 21 nt, synthetic construct
  source 1..21: mol_type = other RNA; note = Description of Artificial Sequence: Synthetic oligonucleotide
tgggcaccagatagctaagtt

SEQ ID NO: 29415 - RNA, 21 nt, synthetic construct
  source 1..21: mol_type = other RNA; note = Description of Artificial Sequence: Synthetic oligonucleotide
ttgggcaccagatagctaatt

SEQ ID NO: 29416 - RNA, 21 nt, synthetic construct
  source 1..21: mol_type = other RNA; note = Description of Artificial Sequence: Synthetic oligonucleotide
tctgggcaccagatagctatt

SEQ ID NO: 29417 - RNA, 21 nt, synthetic construct
  source 1..21: mol_type = other RNA; note = Description of Artificial Sequence: Synthetic oligonucleotide
tcctgggcaccagatagcttt

SEQ ID NO: 29418 - RNA, 21 nt, synthetic construct
  source 1..21: mol_type = other RNA; note = Description of Artificial Sequence: Synthetic oligonucleotide
tgcctgggcaccagatagctt

SEQ ID NO: 29419 - RNA, 21 nt, synthetic construct
  source 1..21: mol_type = other RNA; note = Description of Artificial Sequence: Synthetic oligonucleotide
tagcctgggcaccagatagtt

SEQ ID NO: 29420 - RNA, 21 nt, synthetic construct
  source 1..21: mol_type = other RNA; note = Description of Artificial Sequence: Synthetic oligonucleotide
ttagcctgggcaccagatatt

SEQ ID NO: 29421 - RNA, 21 nt, synthetic construct
  source 1..21: mol_type = other RNA; note = Description of Artificial Sequence: Synthetic oligonucleotide
tatagcctgggcaccagattt

SEQ ID NO: 29422 - RNA, 21 nt, synthetic construct
  source 1..21: mol_type = other RNA; note = Description of Artificial Sequence: Synthetic oligonucleotide
taatagcctgggcaccagatt

SEQ ID NO: 29423 - RNA, 21 nt, synthetic construct
  source 1..21: mol_type = other RNA; note = Description of Artificial Sequence: Synthetic oligonucleotide
tgaatagcctgggcaccagtt

SEQ ID NO: 29424 - RNA, 21 nt, synthetic construct
  source 1..21: mol_type = other RNA; note = Description of Artificial Sequence: Synthetic oligonucleotide
tcgaatagcctgggcaccatt

SEQ ID NO: 29425 - RNA, 21 nt, synthetic construct
  source 1..21: mol_type = other RNA; note = Description of Artificial Sequence: Synthetic oligonucleotide
tccgaatagcctgggcacctt

SEQ ID NO: 29426 - RNA, 21 nt, synthetic construct
  source 1..21: mol_type = other RNA; note = Description of Artificial Sequence: Synthetic oligonucleotide
ttccgaatagcctgggcactt

SEQ ID NO: 29427 - RNA, 21 nt, synthetic construct
  source 1..21: mol_type = other RNA; note = Description of Artificial Sequence: Synthetic oligonucleotide
tttccgaatagcctgggcatt

SEQ ID NO: 29428 - RNA, 21 nt, synthetic construct
  source 1..21: mol_type = other RNA; note = Description of Artificial Sequence: Synthetic oligonucleotide
ttttccgaatagcctgggctt

SEQ ID NO: 29429 - RNA, 21 nt, synthetic construct
  source 1..21: mol_type = other RNA; note = Description of Artificial Sequence: Synthetic oligonucleotide
tgtttccgaatagcctgggtt

SEQ ID NO: 29430 - RNA, 21 nt, synthetic construct
  source 1..21: mol_type = other RNA; note = Description of Artificial Sequence: Synthetic oligonucleotide
tagtttccgaatagcctggtt

SEQ ID NO: 29431 - RNA, 21 nt, synthetic construct
  source 1..21: mol_type = other RNA; note = Description of Artificial Sequence: Synthetic oligonucleotide
tgagtttccgaatagcctgtt

SEQ ID NO: 29432 - RNA, 21 nt, synthetic construct
  source 1..21: mol_type = other RNA; note = Description of Artificial Sequence: Synthetic oligonucleotide
ttgagtttccgaatagccttt

SEQ ID NO: 29433 - RNA, 21 nt, synthetic construct
  source 1..21: mol_type = other RNA; note = Description of Artificial Sequence: Synthetic oligonucleotide
tctgagtttccgaatagcctt

SEQ ID NO: 29434 - RNA, 21 nt, synthetic construct
  source 1..21: mol_type = other RNA; note = Description of Artificial Sequence: Synthetic oligonucleotide
ttctgagtttccgaatagctt

SEQ ID NO: 29435 - RNA, 21 nt, synthetic construct
  source 1..21: mol_type = other RNA; note = Description of Artificial Sequence: Synthetic oligonucleotide
tatctgagtttccgaatagtt

SEQ ID NO: 29436 - RNA, 21 nt, synthetic construct
  source 1..21: mol_type = other RNA; note = Description of Artificial Sequence: Synthetic oligonucleotide
ttatctgagtttccgaatatt

SEQ ID NO: 29437 - RNA, 21 nt, synthetic construct
  source 1..21: mol_type = other RNA; note = Description of Artificial Sequence: Synthetic oligonucleotide
tttatctgagtttccgaattt

SEQ ID NO: 29438 - RNA, 21 nt, synthetic construct
  source 1..21: mol_type = other RNA; note = Description of Artificial Sequence: Synthetic oligonucleotide
ttttatctgagtttccgaatt

SEQ ID NO: 29439 - RNA, 21 nt, synthetic construct
  source 1..21: mol_type = other RNA; note = Description of Artificial Sequence: Synthetic oligonucleotide
tatttatctgagtttccgatt

SEQ ID NO: 29440 - RNA, 21 nt, synthetic construct
  source 1..21: mol_type = other RNA; note = Description of Artificial Sequence: Synthetic oligonucleotide
tcatttatctgagtttccgtt

SEQ ID NO: 29441 - RNA, 21 nt, synthetic construct
  source 1..21: mol_type = other RNA; note = Description of Artificial Sequence: Synthetic oligonucleotide
tgcatttatctgagtttcctt

SEQ ID NO: 29442 - RNA, 21 nt, synthetic construct
  source 1..21: mol_type = other RNA; note = Description of Artificial Sequence: Synthetic oligonucleotide
tagcatttatctgagtttctt

SEQ ID NO: 29443 - RNA, 21 nt, synthetic construct
  source 1..21: mol_type = other RNA; note = Description of Artificial Sequence: Synthetic oligonucleotide
ttagcatttatctgagttttt

SEQ ID NO: 29444 - RNA, 21 nt, synthetic construct
  source 1..21: mol_type = other RNA; note = Description of Artificial Sequence: Synthetic oligonucleotide
tgtagcatttatctgagtttt

SEQ ID NO: 29445 - RNA, 21 nt, synthetic construct
  source 1..21: mol_type = other RNA; note = Description of Artificial Sequence: Synthetic oligonucleotide
tagtagcatttatctgagttt

SEQ ID NO: 29446 - RNA, 21 nt, synthetic construct
  source 1..21: mol_type = other RNA; note = Description of Artificial Sequence: Synthetic oligonucleotide
tgagtagcatttatctgagtt

SEQ ID NO: 29447 - RNA, 21 nt, synthetic construct
  source 1..21: mol_type = other RNA; note = Description of Artificial Sequence: Synthetic oligonucleotide
ttgagtagcatttatctgatt

SEQ ID NO: 29448 - RNA, 21 nt, synthetic construct
  source 1..21: mol_type = other RNA; note = Description of Artificial Sequence: Synthetic oligonucleotide
tctgagtagcatttatctgtt

SEQ ID NO: 29449 - RNA, 21 nt, synthetic construct
  source 1..21: mol_type = other RNA; note = Description of Artificial Sequence: Synthetic oligonucleotide
tcctgagtagcatttatcttt

SEQ ID NO: 29450 - RNA, 21 nt, synthetic construct
  source 1..21: mol_type = other RNA; note = Description of Artificial Sequence: Synthetic oligonucleotide
tgcctgagtagcatttatctt

SEQ ID NO: 29451 - RNA, 21 nt, synthetic construct
  source 1..21: mol_type = other RNA; note = Description of Artificial Sequence: Synthetic oligonucleotide
ttgcctgagtagcatttattt

SEQ ID NO: 29452 - RNA, 21 nt, synthetic construct
  source 1..21: mol_type = other RNA; note = Description of Artificial Sequence: Synthetic oligonucleotide
tttgcctgagtagcatttatt

SEQ ID NO: 29453 - RNA, 21 nt, synthetic construct
  source 1..21: mol_type = other RNA; note = Description of Artificial Sequence: Synthetic oligonucleotide
tattgcctgagtagcattttt

SEQ ID NO: 29454 - RNA, 21 nt, synthetic construct
  source 1..21: mol_type = other RNA; note = Description of Artificial Sequence: Synthetic oligonucleotide
tcattgcctgagtagcatttt

SEQ ID NO: 29455 - RNA, 21 nt, synthetic construct
  source 1..21: mol_type = other RNA; note = Description of Artificial Sequence: Synthetic oligonucleotide
ttcattgcctgagtagcattt

SEQ ID NO: 29456 - RNA, 21 nt, synthetic construct
  source 1..21: mol_type = other RNA; note = Description of Artificial Sequence: Synthetic oligonucleotide
tttcattgcctgagtagcatt

SEQ ID NO: 29457 - RNA, 21 nt, synthetic construct
  source 1..21: mol_type = other RNA; note = Description of Artificial Sequence: Synthetic oligonucleotide
tcttcattgcctgagtagctt

SEQ ID NO: 29458 - RNA, 21 nt, synthetic construct
  source 1..21: mol_type = other RNA; note = Description of Artificial Sequence: Synthetic oligonucleotide
ttcttcattgcctgagtagtt

SEQ ID NO: 29459 - RNA, 21 nt, synthetic construct
  source 1..21: mol_type = other RNA; note = Description of Artificial Sequence: Synthetic oligonucleotide
tttcttcattgcctgagtatt

SEQ ID NO: 29460 - RNA, 21 nt, synthetic construct
  source 1..21: mol_type = other RNA; note = Description of Artificial Sequence: Synthetic oligonucleotide
tcttcttcattgcctgagttt

SEQ ID NO: 29461 - RNA, 21 nt, synthetic construct
  source 1..21: mol_type = other RNA; note = Description of Artificial Sequence: Synthetic oligonucleotide
ttcttcttcattgcctgagtt

SEQ ID NO: 29462 - RNA, 21 nt, synthetic construct
  source 1..21: mol_type = other RNA; note = Description of Artificial Sequence: Synthetic oligonucleotide
tctcttcttcattgcctgatt

SEQ ID NO: 29463 - RNA, 21 nt, synthetic construct
  source 1..21: mol_type = other RNA; note = Description of Artificial Sequence: Synthetic oligonucleotide
tcctcttcttcattgcctgtt

SEQ ID NO: 29464 - RNA, 21 nt, synthetic construct
  source 1..21: mol_type = other RNA; note = Description of Artificial Sequence: Synthetic oligonucleotide
ttcctcttcttcattgccttt

SEQ ID NO: 29465 - RNA, 21 nt, synthetic construct
  source 1..21: mol_type = other RNA; note = Description of Artificial Sequence: Synthetic oligonucleotide
tctcctcttcttcattgcctt

SEQ ID NO: 29466 - RNA, 21 nt, synthetic construct
  source 1..21: mol_type = other RNA; note = Description of Artificial Sequence: Synthetic oligonucleotide
ttctcctcttcttcattgctt

SEQ ID NO: 29467 - RNA, 21 nt, synthetic construct
  source 1..21: mol_type = other RNA; note = Description of Artificial Sequence: Synthetic oligonucleotide
tttctcctcttcttcattgtt

SEQ ID NO: 29468 - RNA, 21 nt, synthetic construct
  source 1..21: mol_type = other RNA; note = Description of Artificial Sequence: Synthetic oligonucleotide
ttttctcctcttcttcatttt

SEQ ID NO: 29469 - RNA, 21 nt, synthetic construct
  source 1..21: mol_type = other RNA; note = Description of Artificial Sequence: Synthetic oligonucleotide
tttttctcctcttcttcattt

SEQ ID NO: 29470 - RNA, 21 nt, synthetic construct
  source 1..21: mol_type = other RNA; note = Description of Artificial Sequence: Synthetic oligonucleotide
ttttttctcctcttcttcatt

SEQ ID NO: 29471 - RNA, 21 nt, synthetic construct
  source 1..21: mol_type = other RNA; note = Description of Artificial Sequence: Synthetic oligonucleotide
tctttttctcctcttcttctt

SEQ ID NO: 29472 - RNA, 21 nt, synthetic construct
  source 1..21: mol_type = other RNA; note = Description of Artificial Sequence: Synthetic oligonucleotide
tcctttttctcctcttctttt

SEQ ID NO: 29473 - RNA, 21 nt, synthetic construct
  source 1..21: mol_type = other RNA; note = Description of Artificial Sequence: Synthetic oligonucleotide
ttcctttttctcctcttcttt

SEQ ID NO: 29474 - RNA, 21 nt, synthetic construct
  source 1..21: mol_type = other RNA; note = Description of Artificial Sequence: Synthetic oligonucleotide
tttcctttttctcctcttctt

SEQ ID NO: 29475 - RNA, 21 nt, synthetic construct
  source 1..21: mol_type = other RNA; note = Description of Artificial Sequence: Synthetic oligonucleotide
ttttcctttttctcctctttt

SEQ ID NO: 29476 - RNA, 21 nt, synthetic construct
  source 1..21: mol_type = other RNA; note = Description of Artificial Sequence: Synthetic oligonucleotide
tctttcctttttctcctcttt

SEQ ID NO: 29477 - RNA, 21 nt, synthetic construct
  source 1..21: mol_type = other RNA; note = Description of Artificial Sequence: Synthetic oligonucleotide
tactttcctttttctcctctt

SEQ ID NO: 29478 - RNA, 21 nt, synthetic construct
  source 1..21: mol_type = other RNA; note = Description of Artificial Sequence: Synthetic oligonucleotide
tgactttcctttttctccttt

SEQ ID NO: 29479 - RNA, 21 nt, synthetic construct
  source 1..21: mol_type = other RNA; note = Description of Artificial Sequence: Synthetic oligonucleotide
ttgactttcctttttctcctt

SEQ ID NO: 29480 - RNA, 21 nt, synthetic construct
  source 1..21: mol_type = other RNA; note = Description of Artificial Sequence: Synthetic oligonucleotide
tgtgactttcctttttctctt

SEQ ID NO: 29481 - RNA, 21 nt, synthetic construct
  source 1..21: mol_type = other RNA; note = Description of Artificial Sequence: Synthetic oligonucleotide
ttgtgactttcctttttcttt

SEQ ID NO: 29482 - RNA, 21 nt, synthetic construct
  source 1..21: mol_type = other RNA; note = Description of Artificial Sequence: Synthetic oligonucleotide
tttgtgactttcctttttctt

SEQ ID NO: 29483 - RNA, 21 nt, synthetic construct
  source 1..21: mol_type = other RNA; note = Description of Artificial Sequence: Synthetic oligonucleotide
tgttgtgactttccttttttt

SEQ ID NO: 29484 - RNA, 21 nt, synthetic construct
  source 1..21: mol_type = other RNA; note = Description of Artificial Sequence: Synthetic oligonucleotide
tggttgtgactttcctttttt

SEQ ID NO: 29485 - RNA, 21 nt, synthetic construct
  source 1..21: mol_type = other RNA; note = Description of Artificial Sequence: Synthetic oligonucleotide
ttggttgtgactttccttttt

SEQ ID NO: 29486 - RNA, 21 nt, synthetic construct
  source 1..21: mol_type = other RNA; note = Description of Artificial Sequence: Synthetic oligonucleotide
tttggttgtgactttcctttt

SEQ ID NO: 29487 - RNA, 21 nt, synthetic construct
  source 1..21: mol_type = other RNA; note = Description of Artificial Sequence: Synthetic oligonucleotide
tattggttgtgactttccttt

SEQ ID NO: 29488 - RNA, 21 nt, synthetic construct
  source 1..21: mol_type = other RNA; note = Description of Artificial Sequence: Synthetic oligonucleotide
ttattggttgtgactttcctt

SEQ ID NO: 29489 - RNA, 21 nt, synthetic construct
  source 1..21: mol_type = other RNA; note = Description of Artificial Sequence: Synthetic oligonucleotide
tttattggttgtgactttctt

SEQ ID NO: 29490 - RNA, 21 nt, synthetic construct
  source 1..21: mol_type = other RNA; note = Description of Artificial Sequence: Synthetic oligonucleotide
ttttattggttgtgacttttt

SEQ ID NO: 29491 - RNA, 21 nt, synthetic construct
  source 1..21: mol_type = other RNA; note = Description of Artificial Sequence: Synthetic oligonucleotide
tatttattggttgtgactttt

SEQ ID NO: 29492 - RNA, 21 nt, synthetic construct
  source 1..21: mol_type = other RNA; note = Description of Artificial Sequence: Synthetic oligonucleotide
tcatttattggttgtgacttt

SEQ ID NO: 29493 - RNA, 21 nt, synthetic construct
  source 1..21: mol_type = other RNA; note = Description of Artificial Sequence: Synthetic oligonucleotide
tacatttattggttgtgactt

SEQ ID NO: 29494 - RNA, 21 nt, synthetic construct
  source 1..21: mol_type = other RNA; note = Description of Artificial Sequence: Synthetic oligonucleotide
tgacatttattggttgtgatt

SEQ ID NO: 29495 - RNA, 21 nt, synthetic construct
  source 1..21: mol_type = other RNA; note = Description of Artificial Sequence: Synthetic oligonucleotide
tagacatttattggttgtgtt

SEQ ID NO: 29496 - RNA, 21 nt, synthetic construct
  source 1..21: mol_type = other RNA; note = Description of Artificial Sequence: Synthetic oligonucleotide
tcagacatttattggttgttt

SEQ ID NO: 29497 - RNA, 21 nt, synthetic construct
  source 1..21: mol_type = other RNA; note = Description of Artificial Sequence: Synthetic oligonucleotide
tccagacatttattggttgtt

SEQ ID NO: 29498 - RNA, 21 nt, synthetic construct
  source 1..21: mol_type = other RNA; note = Description of Artificial Sequence: Synthetic oligonucleotide
ttccagacatttattggtttt

SEQ ID NO: 29499 - RNA, 21 nt, synthetic construct
  source 1..21: mol_type = other RNA; note = Description of Artificial Sequence: Synthetic oligonucleotide
tttccagacatttattggttt

SEQ ID NO: 29500 - RNA, 21 nt, synthetic construct
  source 1..21: mol_type = other RNA; note = Description of Artificial Sequence: Synthetic oligonucleotide
tgttccagacatttattggtt

SEQ ID NO: 29501 - RNA, 21 nt, synthetic construct
  source 1..21: mol_type = other RNA; note = Description of Artificial Sequence: Synthetic oligonucleotide
ttgttccagacatttattgtt

SEQ ID NO: 29502 - RNA, 21 nt, synthetic construct
  source 1..21: mol_type = other RNA; note = Description of Artificial Sequence: Synthetic oligonucleotide
tttgttccagacatttatttt

SEQ ID NO: 29503 - RNA, 21 nt, synthetic construct
  source 1..21: mol_type = other RNA; note = Description of Artificial Sequence: Synthetic oligonucleotide
tcttgttccagacatttattt

SEQ ID NO: 29504 - RNA, 21 nt, synthetic construct
  source 1..21: mol_type = other RNA; note = Description of Artificial Sequence: Synthetic oligonucleotide
tacttgttccagacatttatt

SEQ ID NO: 29505 - RNA, 21 nt, synthetic construct
  source 1..21: mol_type = other RNA; note = Description of Artificial Sequence: Synthetic oligonucleotide
tcacttgttccagacattttt

SEQ ID NO: 29506 - RNA, 21 nt, synthetic construct
  source 1..21: mol_type = other RNA; note = Description of Artificial Sequence: Synthetic oligonucleotide
tacacttgttccagacatttt

SEQ ID NO: 29507 - RNA, 21 nt, synthetic construct
  source 1..21: mol_type = other RNA; note = Description of Artificial Sequence: Synthetic oligonucleotide
tgacacttgttccagacattt

SEQ ID NO: 29508 - RNA, 21 nt, synthetic construct
  source 1..21: mol_type = other RNA; note = Description of Artificial Sequence: Synthetic oligonucleotide
ttgacacttgttccagacatt

SEQ ID NO: 29509 - RNA, 21 nt, synthetic construct
  source 1..21: mol_type = other RNA; note = Description of Artificial Sequence: Synthetic oligonucleotide
tgtgacacttgttccagactt

SEQ ID NO: 29510 - RNA, 21 nt, synthetic construct
  source 1..21: mol_type = other RNA; note = Description of Artificial Sequence: Synthetic oligonucleotide
ttgtgacacttgttccagatt

SEQ ID NO: 29511 - RNA, 21 nt, synthetic construct
  source 1..21: mol_type = other RNA; note = Description of Artificial Sequence: Synthetic oligonucleotide
tttgtgacacttgttccagtt

SEQ ID NO: 29512 - RNA, 21 nt, synthetic construct
  source 1..21: mol_type = other RNA; note = Description of Artificial Sequence: Synthetic oligonucleotide
tattgtgacacttgttccatt

SEQ ID NO: 29513 - RNA, 21 nt, synthetic construct
  source 1..21: mol_type = other RNA; note = Description of Artificial Sequence: Synthetic oligonucleotide
taattgtgacacttgttcctt

SEQ ID NO: 29514 - RNA, 21 nt, synthetic construct
  source 1..21: mol_type = other RNA; note = Description of Artificial Sequence: Synthetic oligonucleotide
ttaattgtgacacttgttctt

SEQ ID NO: 29515 - RNA, 21 nt, synthetic construct
  source 1..21: mol_type = other RNA; note = Description of Artificial Sequence: Synthetic oligonucleotide
tgtaattgtgacacttgtttt

SEQ ID NO: 29516 - RNA, 21 nt, synthetic construct
  source 1..21: mol_type = other RNA; note = Description of Artificial Sequence: Synthetic oligonucleotide
ttgtaattgtgacacttgttt

SEQ ID NO: 29517 - RNA, 21 nt, synthetic construct
  source 1..21: mol_type = other RNA; note = Description of Artificial Sequence: Synthetic oligonucleotide
tttgtaattgtgacacttgtt

SEQ ID NO: 29518 - RNA, 21 nt, synthetic construct
  source 1..21: mol_type = other RNA; note = Description of Artificial Sequence: Synthetic oligonucleotide
tcttgtaattgtgacactttt

SEQ ID NO: 29519 - RNA, 21 nt, synthetic construct
  source 1..21: mol_type = other RNA; note = Description of Artificial Sequence: Synthetic oligonucleotide
tccttgtaattgtgacacttt

SEQ ID NO: 29520 - RNA, 21 nt, synthetic construct
  source 1..21: mol_type = other RNA; note = Description of Artificial Sequence: Synthetic oligonucleotide
ttccttgtaattgtgacactt

SEQ ID NO: 29521 - RNA, 21 nt, synthetic construct
  source 1..21: mol_type = other RNA; note = Description of Artificial Sequence: Synthetic oligonucleotide
tatccttgtaattgtgacatt

SEQ ID NO: 29522 - RNA, 21 nt, synthetic construct
  source 1..21: mol_type = other RNA; note = Description of Artificial Sequence: Synthetic oligonucleotide
taatccttgtaattgtgactt

SEQ ID NO: 29523 - RNA, 21 nt, synthetic construct
  source 1..21: mol_type = other RNA; note = Description of Artificial Sequence: Synthetic oligonucleotide
tcaatccttgtaattgtgatt

SEQ ID NO: 29524 - RNA, 21 nt, synthetic construct
  source 1..21: mol_type = other RNA; note = Description of Artificial Sequence: Synthetic oligonucleotide
tacaatccttgtaattgtgtt

SEQ ID NO: 29525 - RNA, 21 nt, synthetic construct
  source 1..21: mol_type = other RNA; note = Description of Artificial Sequence: Synthetic oligonucleotide
tcacaatccttgtaattgttt

SEQ ID NO: 29526 - RNA, 21 nt, synthetic construct
  source 1..21: mol_type = other RNA; note = Description of Artificial Sequence: Synthetic oligonucleotide
tccacaatccttgtaattgtt

SEQ ID NO: 29527 - RNA, 21 nt, synthetic construct
  source 1..21: mol_type = other RNA; note = Description of Artificial Sequence: Synthetic oligonucleotide
tgccacaatccttgtaatttt

SEQ ID NO: 29528 - RNA, 21 nt, synthetic construct
  source 1..21: mol_type = other RNA; note = Description of Artificial Sequence: Synthetic oligonucleotide
tcgccacaatccttgtaattt

SEQ ID NO: 29529 - RNA, 21 nt, synthetic construct
  source 1..21: mol_type = other RNA; note = Description of Artificial Sequence: Synthetic oligonucleotide
tacgccacaatccttgtaatt

SEQ ID NO: 29530 - RNA, 21 nt, synthetic construct
  source 1..21: mol_type = other RNA; note = Description of Artificial Sequence: Synthetic oligonucleotide
tgacgccacaatccttgtatt

SEQ ID NO: 29531 - RNA, 21 nt, synthetic construct
  source 1..21: mol_type = other RNA; note = Description of Artificial Sequence: Synthetic oligonucleotide
tcgacgccacaatccttgttt

SEQ ID NO: 29532 - RNA, 21 nt, synthetic construct
  source 1..21: mol_type = other RNA; note = Description of Artificial Sequence: Synthetic oligonucleotide
tgcgacgccacaatccttgtt

SEQ ID NO: 29533 - RNA, 21 nt, synthetic construct
  source 1..21: mol_type = other RNA; note = Description of Artificial Sequence: Synthetic oligonucleotide
tagcgacgccacaatcctttt

SEQ ID NO: 29534 - RNA, 21 nt, synthetic construct
  source 1..21: mol_type = other RNA; note = Description of Artificial Sequence: Synthetic oligonucleotide
taagcgacgccacaatccttt

SEQ ID NO: 29535 - RNA, 21 nt, synthetic construct
  source 1..21: mol_type = other RNA; note = Description of Artificial Sequence: Synthetic oligonucleotide
tgaagcgacgccacaatcctt

SEQ ID NO: 29536 - RNA, 21 nt, synthetic construct
  source 1..21: mol_type = other RNA; note = Description of Artificial Sequence: Synthetic oligonucleotide
ttgaagcgacgccacaatctt

SEQ ID NO: 29537 - RNA, 21 nt, synthetic construct
  source 1..21: mol_type = other RNA; note = Description of Artificial Sequence: Synthetic oligonucleotide
tttgaagcgacgccacaattt

SEQ ID NO: 29538 - RNA, 21 nt, synthetic construct
  source 1..21: mol_type = other RNA; note = Description of Artificial Sequence: Synthetic oligonucleotide
tattgaagcgacgccacaatt

SEQ ID NO: 29539 - RNA, 21 nt, synthetic construct
  source 1..21: mol_type = other RNA; note = Description of Artificial Sequence: Synthetic oligonucleotide
tgattgaagcgacgccacatt

SEQ ID NO: 29540 - RNA, 21 nt, synthetic construct
  source 1..21: mol_type = other RNA; note = Description of Artificial Sequence: Synthetic oligonucleotide
tcgattgaagcgacgccactt

SEQ ID NO: 29541 - RNA, 21 nt, synthetic construct
  source 1..21: mol_type = other RNA; note = Description of Artificial Sequence: Synthetic oligonucleotide
ttcgattgaagcgacgccatt

SEQ ID NO: 29542 - RNA, 21 nt, synthetic construct
  source 1..21: mol_type = other RNA; note = Description of Artificial Sequence: Synthetic oligonucleotide
tgtcgattgaagcgacgcctt

SEQ ID NO: 29543 - RNA, 21 nt, synthetic construct
  source 1..21: mol_type = other RNA; note = Description of Artificial Sequence: Synthetic oligonucleotide
tggtcgattgaagcgacgctt

SEQ ID NO: 29544 - RNA, 21 nt, synthetic construct
  source 1..21: mol_type = other RNA; note = Description of Artificial Sequence: Synthetic oligonucleotide
taggtcgattgaagcgacgtt

SEQ ID NO: 29545 - RNA, 21 nt, synthetic construct
  source 1..21: mol_type = other RNA; note = Description of Artificial Sequence: Synthetic oligonucleotide
taaggtcgattgaagcgactt

SEQ ID NO: 29546 - RNA, 21 nt, synthetic construct
  source 1..21: mol_type = other RNA; note = Description of Artificial Sequence: Synthetic oligonucleotide
taaaggtcgattgaagcgatt

SEQ ID NO: 29547 - RNA, 21 nt, synthetic construct
  source 1..21: mol_type = other RNA; note = Description of Artificial Sequence: Synthetic oligonucleotide
ttaaaggtcgattgaagcgtt

SEQ ID NO: 29548 - RNA, 21 nt, synthetic construct
  source 1..21: mol_type = other RNA; note = Description of Artificial Sequence: Synthetic oligonucleotide
tgtaaaggtcgattgaagctt

SEQ ID NO: 29549 - RNA, 21 nt, synthetic construct
  source 1..21: mol_type = other RNA; note = Description of Artificial Sequence: Synthetic oligonucleotide
tagtaaaggtcgattgaagtt

SEQ ID NO: 29550 - RNA, 21 nt, synthetic construct
  source 1..21: mol_type = other RNA; note = Description of Artificial Sequence: Synthetic oligonucleotide
tcagtaaaggtcgattgaatt

SEQ ID NO: 29551 - RNA, 21 nt, synthetic construct
  source 1..21: mol_type = other RNA; note = Description of Artificial Sequence: Synthetic oligonucleotide
ttcagtaaaggtcgattgatt

SEQ ID NO: 29552 - RNA, 21 nt, synthetic construct
  source 1..21: mol_type = other RNA; note = Description of Artificial Sequence: Synthetic oligonucleotide
tttcagtaaaggtcgattgtt

SEQ ID NO: 29553 - RNA, 21 nt, synthetic construct
  source 1..21: mol_type = other RNA; note = Description of Artificial Sequence: Synthetic oligonucleotide
ttttcagtaaaggtcgatttt

SEQ ID NO: 29554 - RNA, 21 nt, synthetic construct
  source 1..21: mol_type = other RNA; note = Description of Artificial Sequence: Synthetic oligonucleotide
tgtttcagtaaaggtcgattt

SEQ ID NO: 29555 - RNA, 21 nt, synthetic construct
  source 1..21: mol_type = other RNA; note = Description of Artificial Sequence: Synthetic oligonucleotide
ttgtttcagtaaaggtcgatt

SEQ ID NO: 29556 - RNA, 21 nt, synthetic construct
  source 1..21: mol_type = other RNA; note = Description of Artificial Sequence: Synthetic oligonucleotide
tttgtttcagtaaaggtcgtt

SEQ ID NO: 29557 - RNA, 21 nt, synthetic construct
  source 1..21: mol_type = other RNA; note = Description of Artificial Sequence: Synthetic oligonucleotide
tgttgtttcagtaaaggtctt

SEQ ID NO: 29558 - RNA, 21 nt, synthetic construct
  source 1..21: mol_type = other RNA; note = Description of Artificial Sequence: Synthetic oligonucleotide
ttgttgtttcagtaaaggttt

SEQ ID NO: 29559 - RNA, 21 nt, synthetic construct
  source 1..21: mol_type = other RNA; note = Description of Artificial Sequence: Synthetic oligonucleotide
tctgttgtttcagtaaaggtt

SEQ ID NO: 29560 - RNA, 21 nt, synthetic construct
  source 1..21: mol_type = other RNA; note = Description of Artificial Sequence: Synthetic oligonucleotide
tactgttgtttcagtaaagtt

SEQ ID NO: 29561 - RNA, 21 nt, synthetic construct
  source 1..21: mol_type = other RNA; note = Description of Artificial Sequence: Synthetic oligonucleotide
ttactgttgtttcagtaaatt

SEQ ID NO: 29562 - RNA, 21 nt, synthetic construct
  source 1..21: mol_type = other RNA; note = Description of Artificial Sequence: Synthetic oligonucleotide
tttactgttgtttcagtaatt

SEQ ID NO: 29563 - RNA, 21 nt, synthetic construct
  source 1..21: mol_type = other RNA; note = Description of Artificial Sequence: Synthetic oligonucleotide
ttttactgttgtttcagtatt

SEQ ID NO: 29564 - RNA, 21 nt, synthetic construct
  source 1..21: mol_type = other RNA; note = Description of Artificial Sequence: Synthetic oligonucleotide
tgtttactgttgtttcagttt

SEQ ID NO: 29565 - RNA, 21 nt, synthetic construct
  source 1..21: mol_type = other RNA; note = Description of Artificial Sequence: Synthetic oligonucleotide
tggtttactgttgtttcagtt

SEQ ID NO: 29566 - RNA, 21 nt, synthetic construct
  source 1..21: mol_type = other RNA; note = Description of Artificial Sequence: Synthetic oligonucleotide
ttggtttactgttgtttcatt

SEQ ID NO: 29567 - RNA, 21 nt, synthetic construct
  source 1..21: mol_type = other RNA; note = Description of Artificial Sequence: Synthetic oligonucleotide
tatggtttactgttgtttctt

SEQ ID NO: 29568 - RNA, 21 nt, synthetic construct
  source 1..21: mol_type = other RNA; note = Description of Artificial Sequence: Synthetic oligonucleotide
tgatggtttactgttgttttt

SEQ ID NO: 29569 - RNA, 21 nt, synthetic construct
  source 1..21: mol_type = other RNA; note = Description of Artificial Sequence: Synthetic oligonucleotide
tagatggtttactgttgtttt

SEQ ID NO: 29570 - RNA, 21 nt, synthetic construct
  source 1..21: mol_type = other RNA; note = Description of Artificial Sequence: Synthetic oligonucleotide
taagatggtttactgttgttt

SEQ ID NO: 29571 - RNA, 21 nt, synthetic construct
  source 1..21: mol_type = other RNA; note = Description of Artificial Sequence: Synthetic oligonucleotide
taaagatggtttactgttgtt

SEQ ID NO: 29572 - RNA, 21 nt, synthetic construct
  source 1..21: mol_type = other RNA; note = Description of Artificial Sequence: Synthetic oligonucleotide
ttaaagatggtttactgtttt

SEQ ID NO: 29573 - RNA, 21 nt, synthetic construct
  source 1..21: mol_type = other RNA; note = Description of Artificial Sequence: Synthetic oligonucleotide
tataaagatggtttactgttt

SEQ ID NO: 29574 - RNA, 21 nt, synthetic construct
  source 1..21: mol_type = other RNA; note = Description of Artificial Sequence: Synthetic oligonucleotide
taataaagatggtttactgtt

SEQ ID NO: 29575 - RNA, 21 nt, synthetic construct
  source 1..21: mol_type = other RNA; note = Description of Artificial Sequence: Synthetic oligonucleotide
ttaataaagatggtttacttt

SEQ ID NO: 29576 - RNA, 21 nt, synthetic construct
  source 1..21: mol_type = other RNA; note = Description of Artificial Sequence: Synthetic oligonucleotide
tataataaagatggtttactt

SEQ ID NO: 29577 - RNA, 21 nt, synthetic construct
  source 1..21: mol_type = other RNA; note = Description of Artificial Sequence: Synthetic oligonucleotide
tcataataaagatggtttatt

SEQ ID NO: 29578 - RNA, 21 nt, synthetic construct
  source 1..21: mol_type = other RNA; note = Description of Artificial Sequence: Synthetic oligonucleotide
tccataataaagatggttttt

SEQ ID NO: 29579 - RNA, 21 nt, synthetic construct
  source 1..21: mol_type = other RNA; note = Description of Artificial Sequence: Synthetic oligonucleotide
taccataataaagatggtttt

SEQ ID NO: 29580 - RNA, 21 nt, synthetic construct
  source 1..21: mol_type = other RNA; note = Description of Artificial Sequence: Synthetic oligonucleotide
tgaccataataaagatggttt

SEQ ID NO: 29581 - RNA, 21 nt, synthetic construct
  source 1..21: mol_type = other RNA; note = Description of Artificial Sequence: Synthetic oligonucleotide
ttgaccataataaagatggtt

SEQ ID NO: 29582 - RNA, 21 nt, synthetic construct
  source 1..21: mol_type = other RNA; note = Description of Artificial Sequence: Synthetic oligonucleotide
tatgaccataataaagatgtt

SEQ ID NO: 29583 - RNA, 21 nt, synthetic construct
  source 1..21: mol_type = other RNA; note = Description of Artificial Sequence: Synthetic oligonucleotide
ttatgaccataataaagattt

SEQ ID NO: 29584 - RNA, 21 nt, synthetic construct
  source 1..21: mol_type = other RNA; note = Description of Artificial Sequence: Synthetic oligonucleotide
tatatgaccataataaagatt

SEQ ID NO: 29585 - RNA, 21 nt, synthetic construct
  source 1..21: mol_type = other RNA; note = Description of Artificial Sequence: Synthetic oligonucleotide
taatatgaccataataaagtt

SEQ ID NO: 29586 - RNA, 21 nt, synthetic construct
  source 1..21: mol_type = other RNA; note = Description of Artificial Sequence: Synthetic oligonucleotide
taaatatgaccataataaatt

SEQ ID NO: 29587 - RNA, 21 nt, synthetic construct
  source 1..21: mol_type = other RNA; note = Description of Artificial Sequence: Synthetic oligonucleotide
tgaaatatgaccataataatt

SEQ ID NO: 29588 - RNA, 21 nt, synthetic construct
  source 1..21: mol_type = other RNA; note = Description of Artificial Sequence: Synthetic oligonucleotide
ttgaaatatgaccataatatt

SEQ ID NO: 29589 - RNA, 21 nt, synthetic construct
  source 1..21: mol_type = other RNA; note = Description of Artificial Sequence: Synthetic oligonucleotide
tgtgaaatatgaccataattt

SEQ ID NO: 29590 - RNA, 21 nt, synthetic construct
  source 1..21: mol_type = other RNA; note = Description of Artificial Sequence: Synthetic oligonucleotide
ttgtgaaatatgaccataatt

SEQ ID NO: 29591 - RNA, 21 nt, synthetic construct
  source 1..21: mol_type = other RNA; note = Description of Artificial Sequence: Synthetic oligonucleotide
tctgtgaaatatgaccatatt

SEQ ID NO: 29592 - RNA, 21 nt, synthetic construct
  source 1..21: mol_type = other RNA; note = Description of Artificial Sequence: Synthetic oligonucleotide
tgctgtgaaatatgaccattt

SEQ ID NO: 29593 - RNA, 21 nt, synthetic construct
  source 1..21: mol_type = other RNA; note = Description of Artificial Sequence: Synthetic oligonucleotide
ttgctgtgaaatatgaccatt

SEQ ID NO: 29594 - RNA, 21 nt, synthetic construct
  source 1..21: mol_type = other RNA; note = Description of Artificial Sequence: Synthetic oligonucleotide
tgtgctgtgaaatatgacctt

SEQ ID NO: 29595 - RNA, 21 nt, synthetic construct
  source 1..21: mol_type = other RNA; note = Description of Artificial Sequence: Synthetic oligonucleotide
tggtgctgtgaaatatgactt

SEQ ID NO: 29596 - RNA, 21 nt, synthetic construct
  source 1..21: mol_type = other RNA; note = Description of Artificial Sequence: Synthetic oligonucleotide
ttggtgctgtgaaatatgatt

SEQ ID NO: 29597 - RNA, 21 nt, synthetic construct
  source 1..21: mol_type = other RNA; note = Description of Artificial Sequence: Synthetic oligonucleotide
tttggtgctgtgaaatatgtt

SEQ ID NO: 29598 - RNA, 21 nt, synthetic construct
  source 1..21: mol_type = other RNA; note = Description of Artificial Sequence: Synthetic oligonucleotide
ttttggtgctgtgaaatattt

SEQ ID NO: 29599 - RNA, 21 nt, synthetic construct
  source 1..21: mol_type = other RNA; note = Description of Artificial Sequence: Synthetic oligonucleotide
tttttggtgctgtgaaatatt

SEQ ID NO: 29600 - RNA, 21 nt, synthetic construct
  source 1..21: mol_type = other RNA; note = Description of Artificial Sequence: Synthetic oligonucleotide
tattttggtgctgtgaaattt

SEQ ID NO: 29601 - RNA, 21 nt, synthetic construct
  source 1..21: mol_type = other RNA; note = Description of Artificial Sequence: Synthetic oligonucleotide
ttattttggtgctgtgaaatt

SEQ ID NO: 29602 - RNA, 21 nt, synthetic construct
  source 1..21: mol_type = other RNA; note = Description of Artificial Sequence: Synthetic oligonucleotide
tttattttggtgctgtgaatt

SEQ ID NO: 29603 - RNA, 21 nt, synthetic construct
  source 1..21: mol_type = other RNA; note = Description of Artificial Sequence: Synthetic oligonucleotide
ttttattttggtgctgtgatt

SEQ ID NO: 29604 - RNA, 21 nt, synthetic construct
  source 1..21: mol_type = other RNA; note = Description of Artificial Sequence: Synthetic oligonucleotide
tatttattttggtgctgtgtt

SEQ ID NO: 29605 - RNA, 21 nt, synthetic construct
  source 1..21: mol_type = other RNA; note = Description of Artificial Sequence: Synthetic oligonucleotide
tgatttattttggtgctgttt

SEQ ID NO: 29606 - RNA, 21 nt, synthetic construct
  source 1..21: mol_type = other RNA; note = Description of Artificial Sequence: Synthetic oligonucleotide
ttgatttattttggtgctgtt

SEQ ID NO: 29607 - RNA, 21 nt, synthetic construct
  source 1..21: mol_type = other RNA; note = Description of Artificial Sequence: Synthetic oligonucleotide
tatgatttattttggtgcttt

SEQ ID NO: 29608 - RNA, 21 nt, synthetic construct
  source 1..21: mol_type = other RNA; note = Description of Artificial Sequence: Synthetic oligonucleotide
tgatgatttattttggtgctt

SEQ ID NO: 29609 - RNA, 21 nt, synthetic construct
  source 1..21: mol_type = other RNA; note = Description of Artificial Sequence: Synthetic oligonucleotide
tagatgatttattttggtgtt

SEQ ID NO: 29610 - RNA, 21 nt, synthetic construct
  source 1..21: mol_type = other RNA; note = Description of Artificial Sequence: Synthetic oligonucleotide
taagatgatttattttggttt

SEQ ID NO: 29611 - RNA, 21 nt, synthetic construct
  source 1..21: mol_type = other RNA; note = Description of Artificial Sequence: Synthetic oligonucleotide
taaagatgatttattttggtt

SEQ ID NO: 29612 - RNA, 21 nt, synthetic construct
  source 1..21: mol_type = other RNA; note = Description of Artificial Sequence: Synthetic oligonucleotide
ttaaagatgatttattttgtt

SEQ ID NO: 29613 - RNA, 21 nt, synthetic construct
  source 1..21: mol_type = other RNA; note = Description of Artificial Sequence: Synthetic oligonucleotide
tataaagatgatttatttttt

SEQ ID NO: 29614 - RNA, 21 nt, synthetic construct
  source 1..21: mol_type = other RNA; note = Description of Artificial Sequence: Synthetic oligonucleotide
taataaagatgatttattttt

SEQ ID NO: 29615 - RNA, 21 nt, synthetic construct
  source 1..21: mol_type = other RNA; note = Description of Artificial Sequence: Synthetic oligonucleotide
ttaataaagatgatttatttt

SEQ ID NO: 29616 - RNA, 21 nt, synthetic construct
  source 1..21: mol_type = other RNA; note = Description of Artificial Sequence: Synthetic oligonucleotide
tttaataaagatgatttattt

SEQ ID NO: 29617 - RNA, 21 nt, synthetic construct
  source 1..21: mol_type = other RNA; note = Description of Artificial Sequence: Synthetic oligonucleotide
tcttaataaagatgatttatt

SEQ ID NO: 29618 - RNA, 21 nt, synthetic construct
  source 1..21: mol_type = other RNA; note = Description of Artificial Sequence: Synthetic oligonucleotide
tacttaataaagatgattttt

SEQ ID NO: 29619 - RNA, 21 nt, synthetic construct
  source 1..21: mol_type = other RNA; note = Description of Artificial Sequence: Synthetic oligonucleotide
ttacttaataaagatgatttt

SEQ ID NO: 29620 - RNA, 21 nt, synthetic construct
  source 1..21: mol_type = other RNA; note = Description of Artificial Sequence: Synthetic oligonucleotide
tctacttaataaagatgattt

SEQ ID NO: 29621 - RNA, 21 nt, synthetic construct
  source 1..21: mol_type = other RNA; note = Description of Artificial Sequence: Synthetic oligonucleotide
ttctacttaataaagatgatt

SEQ ID NO: 29622 - RNA, 21 nt, synthetic construct
  source 1..21: mol_type = other RNA; note = Description of Artificial Sequence: Synthetic oligonucleotide
tatctacttaataaagatgtt

SEQ ID NO: 29623 - RNA, 21 nt, synthetic construct
  source 1..21: mol_type = other RNA; note = Description of Artificial Sequence: Synthetic oligonucleotide
tcatctacttaataaagattt

SEQ ID NO: 29624 - RNA, 21 nt, synthetic construct
  source 1..21: mol_type = other RNA; note = Description of Artificial Sequence: Synthetic oligonucleotide
ttcatctacttaataaagatt

SEQ ID NO: 29625 - RNA, 21 nt, synthetic construct
  source 1..21: mol_type = other RNA; note = Description of Artificial Sequence: Synthetic oligonucleotide
tttcatctacttaataaagtt

SEQ ID NO: 29626 - RNA, 21 nt, synthetic construct
  source 1..21: mol_type = other RNA; note = Description of Artificial Sequence: Synthetic oligonucleotide
ttttcatctacttaataaatt

SEQ ID NO: 29627 - RNA, 21 nt, synthetic construct
  source 1..21: mol_type = other RNA; note = Description of Artificial Sequence: Synthetic oligonucleotide
tgtttcatctacttaataatt

SEQ ID NO: 29628 - RNA, 21 nt, synthetic construct
  source 1..21: mol_type = other RNA; note = Description of Artificial Sequence: Synthetic oligonucleotide
ttgtttcatctacttaatatt

SEQ ID NO: 29629 - RNA, 21 nt, synthetic construct
  source 1..21: mol_type = other RNA; note = Description of Artificial Sequence: Synthetic oligonucleotide
tatgtttcatctacttaattt

SEQ ID NO: 29630 - RNA, 21 nt, synthetic construct
  source 1..21: mol_type = other RNA; note = Description of Artificial Sequence: Synthetic oligonucleotide
taatgtttcatctacttaatt

SEQ ID NO: 29631 - RNA, 21 nt, synthetic construct
  source 1..21: mol_type = other RNA; note = Description of Artificial Sequence: Synthetic oligonucleotide
ttaatgtttcatctacttatt

SEQ ID NO: 29632 - RNA, 21 nt, synthetic construct
  source 1..21: mol_type = other RNA; note = Description of Artificial Sequence: Synthetic oligonucleotide
tttaatgtttcatctactttt

SEQ ID NO: 29633 - RNA, 21 nt, synthetic construct
  source 1..21: mol_type = other RNA; note = Description of Artificial Sequence: Synthetic oligonucleotide
tgttaatgtttcatctacttt

SEQ ID NO: 29634 - RNA, 21 nt, synthetic construct
  source 1..21: mol_type = other RNA; note = Description of Artificial Sequence: Synthetic oligonucleotide
tagttaatgtttcatctactt

SEQ ID NO: 29635 - RNA, 21 nt, synthetic construct
  source 1..21: mol_type = other RNA; note = Description of Artificial Sequence: Synthetic oligonucleotide
tgagttaatgtttcatctatt

SEQ ID NO: 29636 - RNA, 21 nt, synthetic construct
  source 1..21: mol_type = other RNA; note = Description of Artificial Sequence: Synthetic oligonucleotide
tagagttaatgtttcatcttt

SEQ ID NO: 29637 - RNA, 21 nt, synthetic construct
  source 1..21: mol_type = other RNA; note = Description of Artificial Sequence: Synthetic oligonucleotide
ttagagttaatgtttcatctt

SEQ ID NO: 29638 - RNA, 21 nt, synthetic construct
  source 1..21: mol_type = other RNA; note = Description of Artificial Sequence: Synthetic oligonucleotide
tttagagttaatgtttcattt

SEQ ID NO: 29639 - RNA, 21 nt, synthetic construct
  source 1..21: mol_type = other RNA; note = Description of Artificial Sequence: Synthetic oligonucleotide
tgttagagttaatgtttcatt

SEQ ID NO: 29640 - RNA, 21 nt, synthetic construct
  source 1..21: mol_type = other RNA; note = Description of Artificial Sequence: Synthetic oligonucleotide
tagttagagttaatgtttctt

SEQ ID NO: 29641 - RNA, 21 nt, synthetic construct
  source 1..21: mol_type = other RNA; note = Description of Artificial Sequence: Synthetic oligonucleotide
tcagttagagttaatgttttt

SEQ ID NO: 29642 - RNA, 21 nt, synthetic construct
  source 1..21: mol_type = other RNA; note = Description of Artificial Sequence: Synthetic oligonucleotide
tacagttagagttaatgtttt

SEQ ID NO: 29643 - RNA, 21 nt, synthetic construct
  source 1..21: mol_type = other RNA; note = Description of Artificial Sequence: Synthetic oligonucleotide
tcacagttagagttaatgttt

SEQ ID NO: 29644 - RNA, 21 nt, synthetic construct
  source 1..21: mol_type = other RNA; note = Description of Artificial Sequence: Synthetic oligonucleotide
ttcacagttagagttaatgtt

SEQ ID NO: 29645 - RNA, 21 nt, synthetic construct
  source 1..21: mol_type = other RNA; note = Description of Artificial Sequence: Synthetic oligonucleotide
tgtcacagttagagttaattt

SEQ ID NO: 29646 - RNA, 21 nt, synthetic construct
  source 1..21: mol_type = other RNA; note = Description of Artificial Sequence: Synthetic oligonucleotide
ttgtcacagttagagttaatt

SEQ ID NO: 29647 - RNA, 21 nt, synthetic construct
  source 1..21: mol_type = other RNA; note = Description of Artificial Sequence: Synthetic oligonucleotide
tttgtcacagttagagttatt

SEQ ID NO: 29648 - RNA, 21 nt, synthetic construct
  source 1..21: mol_type = other RNA; note = Description of Artificial Sequence: Synthetic oligonucleotide
ttttgtcacagttagagtttt

SEQ ID NO: 29649 - RNA, 21 nt, synthetic construct
  source 1..21: mol_type = other RNA; note = Description of Artificial Sequence: Synthetic oligonucleotide
tctttgtcacagttagagttt

SEQ ID NO: 29650 - RNA, 21 nt, synthetic construct
  source 1..21: mol_type = other RNA; note = Description of Artificial Sequence: Synthetic oligonucleotide
ttctttgtcacagttagagtt

SEQ ID NO: 29651 - RNA, 21 nt, synthetic construct
  source 1..21: mol_type = other RNA; note = Description of Artificial Sequence: Synthetic oligonucleotide
tttctttgtcacagttagatt

SEQ ID NO: 29652 - RNA, 21 nt, synthetic construct
  source 1..21: mol_type = other RNA; note = Description of Artificial Sequence: Synthetic oligonucleotide
tcttctttgtcacagttagtt

SEQ ID NO: 29653 - RNA, 21 nt, synthetic construct
  source 1..21: mol_type = other RNA; note = Description of Artificial Sequence: Synthetic oligonucleotide
ttcttctttgtcacagttatt

SEQ ID NO: 29654 - RNA, 21 nt, synthetic construct
  source 1..21: mol_type = other RNA; note = Description of Artificial Sequence: Synthetic oligonucleotide
tgtcttctttgtcacagtttt

SEQ ID NO: 29655 - RNA, 21 nt, synthetic construct
  source 1..21: mol_type = other RNA; note = Description of Artificial Sequence: Synthetic oligonucleotide
tggtcttctttgtcacagttt

SEQ ID NO: 29656 - RNA, 21 nt, synthetic construct
  source 1..21: mol_type = other RNA; note = Description of Artificial Sequence: Synthetic oligonucleotide
ttggtcttctttgtcacagtt

SEQ ID NO: 29657 - RNA, 21 nt, synthetic construct
  source 1..21: mol_type = other RNA; note = Description of Artificial Sequence: Synthetic oligonucleotide
tgtggtcttctttgtcacatt

SEQ ID NO: 29658 - RNA, 21 nt, synthetic construct
  source 1..21: mol_type = other RNA; note = Description of Artificial Sequence: Synthetic oligonucleotide
ttgtggtcttctttgtcactt

SEQ ID NO: 29659 - RNA, 21 nt, synthetic construct
  source 1..21: mol_type = other RNA; note = Description of Artificial Sequence: Synthetic oligonucleotide
tttgtggtcttctttgtcatt

SEQ ID NO: 29660 - RNA, 21 nt, synthetic construct
  source 1..21: mol_type = other RNA; note = Description of Artificial Sequence: Synthetic oligonucleotide
ttttgtggtcttctttgtctt

SEQ ID NO: 29661 - RNA, 21 nt, synthetic construct
  source 1..21: mol_type = other RNA; note = Description of Artificial Sequence: Synthetic oligonucleotide
tatttgtggtcttctttgttt

SEQ ID NO: 29662 - RNA, 21 nt, synthetic construct
  source 1..21: mol_type = other RNA; note = Description of Artificial Sequence: Synthetic oligonucleotide
ttatttgtggtcttctttgtt

SEQ ID NO: 29663 - RNA, 21 nt, synthetic construct
  source 1..21: mol_type = other RNA; note = Description of Artificial Sequence: Synthetic oligonucleotide
tctatttgtggtcttcttttt

SEQ ID NO: 29664 - RNA, 21 nt, synthetic construct
  source 1..21: mol_type = other RNA; note = Description of Artificial Sequence: Synthetic oligonucleotide
tactatttgtggtcttctttt

SEQ ID NO: 29665 - RNA, 21 nt, synthetic construct
  source 1..21: mol_type = other RNA; note = Description of Artificial Sequence: Synthetic oligonucleotide
taactatttgtggtcttcttt

SEQ ID NO: 29666 - RNA, 21 nt, synthetic construct
  source 1..21: mol_type = other RNA; note = Description of Artificial Sequence: Synthetic oligonucleotide
ttaactatttgtggtcttctt

SEQ ID NO: 29667 - RNA, 21 nt, synthetic construct
  source 1..21: mol_type = other RNA; note = Description of Artificial Sequence: Synthetic oligonucleotide
tataactatttgtggtctttt

SEQ ID NO: 29668 - RNA, 21 nt, synthetic construct
  source 1..21: mol_type = other RNA; note = Description of Artificial Sequence: Synthetic oligonucleotide
tgataactatttgtggtcttt

SEQ ID NO: 29669 - RNA, 21 nt, synthetic construct
  source 1..21: mol_type = other RNA; note = Description of Artificial Sequence: Synthetic oligonucleotide
tagataactatttgtggtctt

SEQ ID NO: 29670 - RNA, 21 nt, synthetic construct
  source 1..21: mol_type = other RNA; note = Description of Artificial Sequence: Synthetic oligonucleotide
taagataactatttgtggttt

SEQ ID NO: 29671 - RNA, 21 nt, synthetic construct
  source 1..21: mol_type = other RNA; note = Description of Artificial Sequence: Synthetic oligonucleotide
taaagataactatttgtggtt

SEQ ID NO: 29672 - RNA, 21 nt, synthetic construct
  source 1..21: mol_type = other RNA; note = Description of Artificial Sequence: Synthetic oligonucleotide
taaaagataactatttgtgtt

SEQ ID NO: 29673 - RNA, 21 nt, synthetic construct
  source 1..21: mol_type = other RNA; note = Description of Artificial Sequence: Synthetic oligonucleotide
ttaaaagataactatttgttt

SEQ ID NO: 29674 - RNA, 21 nt, synthetic construct
  source 1..21: mol_type = other RNA; note = Description of Artificial Sequence: Synthetic oligonucleotide
tttaaaagataactatttgtt

SEQ ID NO: 29675 - RNA, 21 nt, synthetic construct
  source 1..21: mol_type = other RNA; note = Description of Artificial Sequence: Synthetic oligonucleotide
tattaaaagataactattttt

SEQ ID NO: 29676 - RNA, 21 nt, synthetic construct
  source 1..21: mol_type = other RNA; note = Description of Artificial Sequence: Synthetic oligonucleotide
taattaaaagataactatttt

SEQ ID NO: 29677 - RNA, 21 nt, synthetic construct
  source 1..21: mol_type = other RNA; note = Description of Artificial Sequence: Synthetic oligonucleotide
ttaattaaaagataactattt

SEQ ID NO: 29678 - RNA, 21 nt, synthetic construct
  source 1..21: mol_type = other RNA; note = Description of Artificial Sequence: Synthetic oligonucleotide
tgtaattaaaagataactatt

SEQ ID NO: 29679 - RNA, 21 nt, synthetic construct
  source 1..21: mol_type = other RNA; note = Description of Artificial Sequence: Synthetic oligonucleotide
ttgtaattaaaagataacttt

SEQ ID NO: 29680 - RNA, 21 nt, synthetic construct
  source 1..21: mol_type = other RNA; note = Description of Artificial Sequence: Synthetic oligonucleotide
tctgtaattaaaagataactt

SEQ ID NO: 29681 - RNA, 21 nt, synthetic construct
  source 1..21: mol_type = other RNA; note = Description of Artificial Sequence: Synthetic oligonucleotide
ttctgtaattaaaagataatt

SEQ ID NO: 29682 - RNA, 21 nt, synthetic construct
  source 1..21: mol_type = other RNA; note = Description of Artificial Sequence: Synthetic oligonucleotide
tttctgtaattaaaagatatt

SEQ ID NO: 29683 - RNA, 21 nt, synthetic construct
  source 1..21: mol_type = other RNA; note = Description of Artificial Sequence: Synthetic oligonucleotide
tcttctgtaattaaaagattt

SEQ ID NO: 29684 - RNA, 21 nt, synthetic construct
  source 1..21: mol_type = other RNA; note = Description of Artificial Sequence: Synthetic oligonucleotide
ttcttctgtaattaaaagatt

SEQ ID NO: 29685 - RNA, 21 nt, synthetic construct
  source 1..21: mol_type = other RNA; note = Description of Artificial Sequence: Synthetic oligonucleotide
tctcttctgtaattaaaagtt

SEQ ID NO: 29686 - RNA, 21 nt, synthetic construct
  source 1..21: mol_type = other RNA; note = Description of Artificial Sequence: Synthetic oligonucleotide
tactcttctgtaattaaaatt

SEQ ID NO: 29687 - RNA, 21 nt, synthetic construct
  source 1..21: mol_type = other RNA; note = Description of Artificial Sequence: Synthetic oligonucleotide
taactcttctgtaattaaatt

SEQ ID NO: 29688 - RNA, 21 nt, synthetic construct
  source 1..21: mol_type = other RNA; note = Description of Artificial Sequence: Synthetic oligonucleotide
taaactcttctgtaattaatt

SEQ ID NO: 29689 - RNA, 21 nt, synthetic construct
  source 1..21: mol_type = other RNA; note = Description of Artificial Sequence: Synthetic oligonucleotide
tgaaactcttctgtaattatt

SEQ ID NO: 29690 - RNA, 21 nt, synthetic construct
  source 1..21: mol_type = other RNA; note = Description of Artificial Sequence: Synthetic oligonucleotide
tagaaactcttctgtaatttt

SEQ ID NO: 29691 - RNA, 21 nt, synthetic construct
  source 1..21: mol_type = other RNA; note = Description of Artificial Sequence: Synthetic oligonucleotide
taagaaactcttctgtaattt

SEQ ID NO: 29692 - RNA, 21 nt, synthetic construct
  source 1..21: mol_type = other RNA; note = Description of Artificial Sequence: Synthetic oligonucleotide
ttaagaaactcttctgtaatt

SEQ ID NO: 29693 - RNA, 21 nt, synthetic construct
  source 1..21: mol_type = other RNA; note = Description of Artificial Sequence: Synthetic oligonucleotide
tttaagaaactcttctgtatt

SEQ ID NO: 29694 - RNA, 21 nt, synthetic construct
  source 1..21: mol_type = other RNA; note = Description of Artificial Sequence: Synthetic oligonucleotide
tgttaagaaactcttctgttt

SEQ ID NO: 29695 - RNA, 21 nt, synthetic construct
  source 1..21: mol_type = other RNA; note = Description of Artificial Sequence: Synthetic oligonucleotide
tagttaagaaactcttctgtt

SEQ ID NO: 29696 - RNA, 21 nt, synthetic construct
  source 1..21: mol_type = other RNA; note = Description of Artificial Sequence: Synthetic oligonucleotide
taagttaagaaactcttcttt

SEQ ID NO: 29697 - RNA, 21 nt, synthetic construct
  source 1..21: mol_type = other RNA; note = Description of Artificial Sequence: Synthetic oligonucleotide
ttaagttaagaaactcttctt

SEQ ID NO: 29698 - RNA, 21 nt, synthetic construct
  source 1..21: mol_type = other RNA; note = Description of Artificial Sequence: Synthetic oligonucleotide
tgtaagttaagaaactctttt

SEQ ID NO: 29699 - RNA, 21 nt, synthetic construct
  source 1..21: mol_type = other RNA; note = Description of Artificial Sequence: Synthetic oligonucleotide
tagtaagttaagaaactcttt

SEQ ID NO: 29700 - RNA, 21 nt, synthetic construct
  source 1..21: mol_type = other RNA; note = Description of Artificial Sequence: Synthetic oligonucleotide
taagtaagttaagaaactctt

SEQ ID NO: 29701 - RNA, 21 nt, synthetic construct
  source 1..21: mol_type = other RNA; note = Description of Artificial Sequence: Synthetic oligonucleotide
taaagtaagttaagaaacttt

SEQ ID NO: 29702 - RNA, 21 nt, synthetic construct
  source 1..21: mol_type = other RNA; note = Description of Artificial Sequence: Synthetic oligonucleotide
taaaagtaagttaagaaactt

SEQ ID NO: 29703 - RNA, 21 nt, synthetic construct
  source 1..21: mol_type = other RNA; note = Description of Artificial Sequence: Synthetic oligonucleotide
tcaaaagtaagttaagaaatt

SEQ ID NO: 29704 - RNA, 21 nt, synthetic construct
  source 1..21: mol_type = other RNA; note = Description of Artificial Sequence: Synthetic oligonucleotide
tacaaaagtaagttaagaatt

SEQ ID NO: 29705 - RNA, 21 nt, synthetic construct
  source 1..21: mol_type = other RNA; note = Description of Artificial Sequence: Synthetic oligonucleotide
ttacaaaagtaagttaagatt

SEQ ID NO: 29706 - RNA, 21 nt, synthetic construct
  source 1..21: mol_type = other RNA; note = Description of Artificial Sequence: Synthetic oligonucleotide
tttacaaaagtaagttaagtt

SEQ ID NO: 29707 - RNA, 21 nt, synthetic construct
  source 1..21: mol_type = other RNA; note = Description of Artificial Sequence: Synthetic oligonucleotide
tcttacaaaagtaagttaatt

SEQ ID NO: 29708 - RNA, 21 nt, synthetic construct
  source 1..21: mol_type = other RNA; note = Description of Artificial Sequence: Synthetic oligonucleotide
tacttacaaaagtaagttatt

SEQ ID NO: 29709 - RNA, 21 nt, synthetic construct
  source 1..21: mol_type = other RNA; note = Description of Artificial Sequence: Synthetic oligonucleotide
taacttacaaaagtaagtttt

SEQ ID NO: 29710 - RNA, 21 nt, synthetic construct
  source 1..21: mol_type = other RNA; note = Description of Artificial Sequence: Synthetic oligonucleotide
taaacttacaaaagtaagttt

SEQ ID NO: 29711 - RNA, 21 nt, synthetic construct
  source 1..21: mol_type = other RNA; note = Description of Artificial Sequence: Synthetic oligonucleotide
taaaacttacaaaagtaagtt

SEQ ID NO: 29712 - RNA, 21 nt, synthetic construct
  source 1..21: mol_type = other RNA; note = Description of Artificial Sequence: Synthetic oligonucleotide
taaaaacttacaaaagtaatt

SEQ ID NO: 29713 - RNA, 21 nt, synthetic construct
  source 1..21: mol_type = other RNA; note = Description of Artificial Sequence: Synthetic oligonucleotide
ttaaaaacttacaaaagtatt

SEQ ID NO: 29714 - RNA, 21 nt, synthetic construct
  source 1..21: mol_type = other RNA; note = Description of Artificial Sequence: Synthetic oligonucleotide
tataaaaacttacaaaagttt

SEQ ID NO: 29715 - RNA, 21 nt, synthetic construct
  source 1..21: mol_type = other RNA; note = Description of Artificial Sequence: Synthetic oligonucleotide
taataaaaacttacaaaagtt

SEQ ID NO: 29716 - RNA, 21 nt, synthetic construct
  source 1..21: mol_type = other RNA; note = Description of Artificial Sequence: Synthetic oligonucleotide
tcaataaaaacttacaaaatt

SEQ ID NO: 29717 - RNA, 21 nt, synthetic construct
  source 1..21: mol_type = other RNA; note = Description of Artificial Sequence: Synthetic oligonucleotide
tacaataaaaacttacaaatt

SEQ ID NO: 29718 - RNA, 21 nt, synthetic construct
  source 1..21: mol_type = other RNA; note = Description of Artificial Sequence: Synthetic oligonucleotide
tcacaataaaaacttacaatt

SEQ ID NO: 29719 - RNA, 21 nt, synthetic construct
  source 1..21: mol_type = other RNA; note = Description of Artificial Sequence: Synthetic oligonucleotide
tacacaataaaaacttacatt

SEQ ID NO: 29720 - RNA, 21 nt, synthetic construct
  source 1..21: mol_type = other RNA; note = Description of Artificial Sequence: Synthetic oligonucleotide
ttacacaataaaaacttactt

SEQ ID NO: 29721 - RNA, 21 nt, synthetic construct
  source 1..21: mol_type = other RNA; note = Description of Artificial Sequence: Synthetic oligonucleotide
tttacacaataaaaacttatt

SEQ ID NO: 29722 - RNA, 21 nt, synthetic construct
  source 1..21: mol_type = other RNA; note = Description of Artificial Sequence: Synthetic oligonucleotide
tcttacacaataaaaactttt

SEQ ID NO: 29723 - RNA, 21 nt, synthetic construct
  source 1..21: mol_type = other RNA; note = Description of Artificial Sequence: Synthetic oligonucleotide
tacttacacaataaaaacttt

SEQ ID NO: 29724 - RNA, 21 nt, synthetic construct
  source 1..21: mol_type = other RNA; note = Description of Artificial Sequence: Synthetic oligonucleotide
taacttacacaataaaaactt

SEQ ID NO: 29725 - RNA, 21 nt, synthetic construct
  source 1..21: mol_type = other RNA; note = Description of Artificial Sequence: Synthetic oligonucleotide
taaacttacacaataaaaatt

SEQ ID NO: 29726 - RNA, 21 nt, synthetic construct
  source 1..21: mol_type = other RNA; note = Description of Artificial Sequence: Synthetic oligonucleotide
ttaaacttacacaataaaatt

SEQ ID NO: 29727 - RNA, 21 nt, synthetic construct
  source 1..21: mol_type = other RNA; note = Description of Artificial Sequence: Synthetic oligonucleotide
tataaacttacacaataaatt

SEQ ID NO: 29728 - RNA, 21 nt, synthetic construct
  source 1..21: mol_type = other RNA; note = Description of Artificial Sequence: Synthetic oligonucleotide
ttataaacttacacaataatt

SEQ ID NO: 29729 - RNA, 21 nt, synthetic construct
  source 1..21: mol_type = other RNA; note = Description of Artificial Sequence: Synthetic oligonucleotide
tttataaacttacacaatatt

SEQ ID NO: 29730 - RNA, 21 nt, synthetic construct
  source 1..21: mol_type = other RNA; note = Description of Artificial Sequence: Synthetic oligonucleotide
tattataaacttacacaattt

SEQ ID NO: 29731 - RNA, 21 nt, synthetic construct
  source 1..21: mol_type = other RNA; note = Description of Artificial Sequence: Synthetic oligonucleotide
tcattataaacttacacaatt

SEQ ID NO: 29732 - RNA, 21 nt, synthetic construct
  source 1..21: mol_type = other RNA; note = Description of Artificial Sequence: Synthetic oligonucleotide
tgcattataaacttacacatt

SEQ ID NO: 29733 - RNA, 21 nt, synthetic construct
  source 1..21: mol_type = other RNA; note = Description of Artificial Sequence: Synthetic oligonucleotide
ttgcattataaacttacactt

SEQ ID NO: 29734 - RNA, 21 nt, synthetic construct
  source 1..21: mol_type = other RNA; note = Description of Artificial Sequence: Synthetic oligonucleotide
tctgcattataaacttacatt

SEQ ID NO: 29735 - RNA, 21 nt, synthetic construct
  source 1..21: mol_type = other RNA; note = Description of Artificial Sequence: Synthetic oligonucleotide
tcctgcattataaacttactt

SEQ ID NO: 29736 - RNA, 21 nt, synthetic construct
  source 1..21: mol_type = other RNA; note = Description of Artificial Sequence: Synthetic oligonucleotide
tccctgcattataaacttatt

SEQ ID NO: 29737 - RNA, 21 nt, synthetic construct
  source 1..21: mol_type = other RNA; note = Description of Artificial Sequence: Synthetic oligonucleotide
tcccctgcattataaactttt

SEQ ID NO: 29738 - RNA, 21 nt, synthetic construct
  source 1..21: mol_type = other RNA; note = Description of Artificial Sequence: Synthetic oligonucleotide
ttcccctgcattataaacttt

SEQ ID NO: 29739 - RNA, 21 nt, synthetic construct
  source 1..21: mol_type = other RNA; note = Description of Artificial Sequence: Synthetic oligonucleotide
tttcccctgcattataaactt

SEQ ID NO: 29740 - RNA, 21 nt, synthetic construct
  source 1..21: mol_type = other RNA; note = Description of Artificial Sequence: Synthetic oligonucleotide
tcttcccctgcattataaatt

SEQ ID NO: 29741 - RNA, 21 nt, synthetic construct
  source 1..21: mol_type = other RNA; note = Description of Artificial Sequence: Synthetic oligonucleotide
tacttcccctgcattataatt

SEQ ID NO: 29742 - RNA, 21 nt, synthetic construct
  source 1..21: mol_type = other RNA; note = Description of Artificial Sequence: Synthetic oligonucleotide
ttacttcccctgcattatatt

SEQ ID NO: 29743 - RNA, 21 nt, synthetic construct
  source 1..21: mol_type = other RNA; note = Description of Artificial Sequence: Synthetic oligonucleotide
tgtacttcccctgcattattt

SEQ ID NO: 29744 - RNA, 21 nt, synthetic construct
  source 1..21: mol_type = other RNA; note = Description of Artificial Sequence: Synthetic oligonucleotide
tagtacttcccctgcattatt

SEQ ID NO: 29745 - RNA, 21 nt, synthetic construct
  source 1..21: mol_type = other RNA; note = Description of Artificial Sequence: Synthetic oligonucleotide
ttagtacttcccctgcatttt

SEQ ID NO: 29746 - RNA, 21 nt, synthetic construct
  source 1..21: mol_type = other RNA; note = Description of Artificial Sequence: Synthetic oligonucleotide
tgtagtacttcccctgcattt

SEQ ID NO: 29747 - RNA, 21 nt, synthetic construct
  source 1..21: mol_type = other RNA; note = Description of Artificial Sequence: Synthetic oligonucleotide
tagtagtacttcccctgcatt

SEQ ID NO: 29748 - RNA, 21 nt, synthetic construct
  source 1..21: mol_type = other RNA; note = Description of Artificial Sequence: Synthetic oligonucleotide
tgagtagtacttcccctgctt

SEQ ID NO: 29749 - RNA, 21 nt, synthetic construct
  source 1..21: mol_type = other RNA; note = Description of Artificial Sequence: Synthetic oligonucleotide
tggagtagtacttcccctgtt

SEQ ID NO: 29750 - RNA, 21 nt, synthetic construct
  source 1..21: mol_type = other RNA; note = Description of Artificial Sequence: Synthetic oligonucleotide
taggagtagtacttccccttt

SEQ ID NO: 29751 - RNA, 21 nt, synthetic construct
  source 1..21: mol_type = other RNA; note = Description of Artificial Sequence: Synthetic oligonucleotide
tgaggagtagtacttcccctt

SEQ ID NO: 29752 - RNA, 21 nt, synthetic construct
  source 1..21: mol_type = other RNA; note = Description of Artificial Sequence: Synthetic oligonucleotide
ttgaggagtagtacttccctt

SEQ ID NO: 29753 - RNA, 21 nt, synthetic construct
  source 1..21: mol_type = other RNA; note = Description of Artificial Sequence: Synthetic oligonucleotide
tttgaggagtagtacttcctt

SEQ ID NO: 29754 - RNA, 21 nt, synthetic construct
  source 1..21: mol_type = other RNA; note = Description of Artificial Sequence: Synthetic oligonucleotide
ttttgaggagtagtacttctt

SEQ ID NO: 29755 - RNA, 21 nt, synthetic construct
  source 1..21: mol_type = other RNA; note = Description of Artificial Sequence: Synthetic oligonucleotide
tatttgaggagtagtactttt

SEQ ID NO: 29756 - RNA, 21 nt, synthetic construct
  source 1..21: mol_type = other RNA; note = Description of Artificial Sequence: Synthetic oligonucleotide
tcatttgaggagtagtacttt

SEQ ID NO: 29757 - RNA, 21 nt, synthetic construct
  source 1..21: mol_type = other RNA; note = Description of Artificial Sequence: Synthetic oligonucleotide
tacatttgaggagtagtactt

SEQ ID NO: 29758 - RNA, 21 nt, synthetic construct
  source 1..21: mol_type = other RNA; note = Description of Artificial Sequence: Synthetic oligonucleotide
taacatttgaggagtagtatt

SEQ ID NO: 29759 - RNA, 21 nt, synthetic construct
  source 1..21: mol_type = other RNA; note = Description of Artificial Sequence: Synthetic oligonucleotide
tcaacatttgaggagtagttt

SEQ ID NO: 29760 - RNA, 21 nt, synthetic construct
  source 1..21: mol_type = other RNA; note = Description of Artificial Sequence: Synthetic oligonucleotide
ttcaacatttgaggagtagtt

SEQ ID NO: 29761 - RNA, 21 nt, synthetic construct
  source 1..21: mol_type = other RNA; note = Description of Artificial Sequence: Synthetic oligonucleotide
tctcaacatttgaggagtatt

SEQ ID NO: 29762 - RNA, 21 nt, synthetic construct
  source 1..21: mol_type = other RNA; note = Description of Artificial Sequence: Synthetic oligonucleotide
tcctcaacatttgaggagttt

SEQ ID NO: 29763 - RNA, 21 nt, synthetic construct
  source 1..21: mol_type = other RNA; note = Description of Artificial Sequence: Synthetic oligonucleotide
tccctcaacatttgaggagtt

SEQ ID NO: 29764 - RNA, 21 nt, synthetic construct
  source 1..21: mol_type = other RNA; note = Description of Artificial Sequence: Synthetic oligonucleotide
ttccctcaacatttgaggatt

SEQ ID NO: 29765 - RNA, 21 nt, synthetic construct
  source 1..21: mol_type = other RNA; note = Description of Artificial Sequence: Synthetic oligonucleotide
tttccctcaacatttgaggtt

SEQ ID NO: 29766 - RNA, 21 nt, synthetic construct
  source 1..21: mol_type = other RNA; note = Description of Artificial Sequence: Synthetic oligonucleotide
tcttccctcaacatttgagtt

SEQ ID NO: 29767 - RNA, 21 nt, synthetic construct
  source 1..21: mol_type = other RNA; note = Description of Artificial Sequence: Synthetic oligonucleotide
tgcttccctcaacatttgatt

SEQ ID NO: 29768 - RNA, 21 nt, synthetic construct
  source 1..21: mol_type = other RNA; note = Description of Artificial Sequence: Synthetic oligonucleotide
tagcttccctcaacatttgtt

SEQ ID NO: 29769 - RNA, 21 nt, synthetic construct
  source 1..21: mol_type = other RNA; note = Description of Artificial Sequence: Synthetic oligonucleotide
taagcttccctcaacattttt

SEQ ID NO: 29770 - RNA, 21 nt, synthetic construct
  source 1..21: mol_type = other RNA; note = Description of Artificial Sequence: Synthetic oligonucleotide
tgaagcttccctcaacatttt

SEQ ID NO: 29771 - RNA, 21 nt, synthetic construct
  source 1..21: mol_type = other RNA; note = Description of Artificial Sequence: Synthetic oligonucleotide
tggaagcttccctcaacattt

SEQ ID NO: 29772 - RNA, 21 nt, synthetic construct
  source 1..21: mol_type = other RNA; note = Description of Artificial Sequence: Synthetic oligonucleotide
ttggaagcttccctcaacatt

SEQ ID NO: 29773 - RNA, 21 nt, synthetic construct
  source 1..21: mol_type = other RNA; note = Description of Artificial Sequence: Synthetic oligonucleotide
tatggaagcttccctcaactt

SEQ ID NO: 29774 - RNA, 21 nt, synthetic construct
  source 1..21: mol_type = other RNA; note = Description of Artificial Sequence: Synthetic oligonucleotide
ttatggaagcttccctcaatt

SEQ ID NO: 29775 - RNA, 21 nt, synthetic construct
  source 1..21: mol_type = other RNA; note = Description of Artificial Sequence: Synthetic oligonucleotide
tttatggaagcttccctcatt

SEQ ID NO: 29776 - RNA, 21 nt, synthetic construct
  source 1..21: mol_type = other RNA; note = Description of Artificial Sequence: Synthetic oligonucleotide
tgttatggaagcttccctctt

SEQ ID NO: 29777 - RNA, 21 nt, synthetic construct
  source 1..21: mol_type = other RNA; note = Description of Artificial Sequence: Synthetic oligonucleotide
ttgttatggaagcttcccttt

SEQ ID NO: 29778 - RNA, 21 nt, synthetic construct
  source 1..21: mol_type = other RNA; note = Description of Artificial Sequence: Synthetic oligonucleotide
tatgttatggaagcttccctt

SEQ ID NO: 29779 - RNA, 21 nt, synthetic construct
  source 1..21: mol_type = other RNA; note = Description of Artificial Sequence: Synthetic oligonucleotide
taatgttatggaagcttcctt

SEQ ID NO: 29780 - RNA, 21 nt, synthetic construct
  source 1..21: mol_type = other RNA; note = Description of Artificial Sequence: Synthetic oligonucleotide
tcaatgttatggaagcttctt

SEQ ID NO: 29781 - RNA, 21 nt, synthetic construct
  source 1..21: mol_type = other RNA; note = Description of Artificial Sequence: Synthetic oligonucleotide
ttcaatgttatggaagctttt

SEQ ID NO: 29782 - RNA, 21 nt, synthetic construct
  source 1..21: mol_type = other RNA; note = Description of Artificial Sequence: Synthetic oligonucleotide
tatcaatgttatggaagcttt

SEQ ID NO: 29783 - RNA, 21 nt, synthetic construct
  source 1..21: mol_type = other RNA; note = Description of Artificial Sequence: Synthetic oligonucleotide
tcatcaatgttatggaagctt

SEQ ID NO: 29784 - RNA, 21 nt, synthetic construct
  source 1..21: mol_type = other RNA; note = Description of Artificial Sequence: Synthetic oligonucleotide
ttcatcaatgttatggaagtt

SEQ ID NO: 29785 - RNA, 21 nt, synthetic construct
  source 1..21: mol_type = other RNA; note = Description of Artificial Sequence: Synthetic oligonucleotide
tgtcatcaatgttatggaatt

SEQ ID NO: 29786 - RNA, 21 nt, synthetic construct
  source 1..21: mol_type = other RNA; note = Description of Artificial Sequence: Synthetic oligonucleotide
tagtcatcaatgttatggatt

SEQ ID NO: 29787 - RNA, 21 nt, synthetic construct
  source 1..21: mol_type = other RNA; note = Description of Artificial Sequence: Synthetic oligonucleotide
tcagtcatcaatgttatggtt

SEQ ID NO: 29788 - RNA, 21 nt, synthetic construct
  source 1..21: mol_type = other RNA; note = Description of Artificial Sequence: Synthetic oligonucleotide
tccagtcatcaatgttatgtt

SEQ ID NO: 29789 - RNA, 21 nt, synthetic construct
  source 1..21: mol_type = other RNA; note = Description of Artificial Sequence: Synthetic oligonucleotide
tgccagtcatcaatgttattt

SEQ ID NO: 29790 - RNA, 21 nt, synthetic construct
  source 1..21: mol_type = other RNA; note = Description of Artificial Sequence: Synthetic oligonucleotide
tagccagtcatcaatgttatt

SEQ ID NO: 29791 - RNA, 21 nt, synthetic construct
  source 1..21: mol_type = other RNA; note = Description of Artificial Sequence: Synthetic oligonucleotide
taagccagtcatcaatgtttt

SEQ ID NO: 29792 - RNA, 21 nt, synthetic construct
  source 1..21: mol_type = other RNA; note = Description of Artificial Sequence: Synthetic oligonucleotide
tgaagccagtcatcaatgttt

SEQ ID NO: 29793 - RNA, 21 nt, synthetic construct
  source 1..21: mol_type = other RNA; note = Description of Artificial Sequence: Synthetic oligonucleotide
ttgaagccagtcatcaatgtt

SEQ ID NO: 29794 - RNA, 21 nt, synthetic construct
  source 1..21: mol_type = other RNA; note = Description of Artificial Sequence: Synthetic oligonucleotide
tatgaagccagtcatcaattt

SEQ ID NO: 29795 - RNA, 21 nt, synthetic construct
  source 1..21: mol_type = other RNA; note = Description of Artificial Sequence: Synthetic oligonucleotide
tcatgaagccagtcatcaatt

SEQ ID NO: 29796 - RNA, 21 nt, synthetic construct
  source 1..21: mol_type = other RNA; note = Description of Artificial Sequence: Synthetic oligonucleotide
tccatgaagccagtcatcatt

SEQ ID NO: 29797 - RNA, 21 nt, synthetic construct
  source 1..21: mol_type = other RNA; note = Description of Artificial Sequence: Synthetic oligonucleotide
tgccatgaagccagtcatctt

SEQ ID NO: 29798 - RNA, 21 nt, synthetic construct
  source 1..21: mol_type = other RNA; note = Description of Artificial Sequence: Synthetic oligonucleotide
ttgccatgaagccagtcattt

SEQ ID NO: 29799 - RNA, 21 nt, synthetic construct
  source 1..21: mol_type = other RNA; note = Description of Artificial Sequence: Synthetic oligonucleotide
tctgccatgaagccagtcatt

SEQ ID NO: 29800 - RNA, 21 nt, synthetic construct
  source 1..21: mol_type = other RNA; note = Description of Artificial Sequence: Synthetic oligonucleotide
tactgccatgaagccagtctt

SEQ ID NO: 29801 - RNA, 21 nt, synthetic construct
  source 1..21: mol_type = other RNA; note = Description of Artificial Sequence: Synthetic oligonucleotide
ttactgccatgaagccagttt

SEQ ID NO: 29802 - RNA, 21 nt, synthetic construct
  source 1..21: mol_type = other RNA; note = Description of Artificial Sequence: Synthetic oligonucleotide
tttactgccatgaagccagtt

SEQ ID NO: 29803 - RNA, 21 nt, synthetic construct
  source 1..21: mol_type = other RNA; note = Description of Artificial Sequence: Synthetic oligonucleotide
tattactgccatgaagccatt

SEQ ID NO: 29804 - RNA, 21 nt, synthetic construct
  source 1..21: mol_type = other RNA; note = Description of Artificial Sequence: Synthetic oligonucleotide
taattactgccatgaagcctt

SEQ ID NO: 29805 - RNA, 21 nt, synthetic construct
  source 1..21: mol_type = other RNA; note = Description of Artificial Sequence: Synthetic oligonucleotide
tgaattactgccatgaagctt

SEQ ID NO: 29806 - RNA, 21 nt, synthetic construct
  source 1..21: mol_type = other RNA; note = Description of Artificial Sequence: Synthetic oligonucleotide
tagaattactgccatgaagtt

SEQ ID NO: 29807 - RNA, 21 nt, synthetic construct
  source 1..21: mol_type = other RNA; note = Description of Artificial Sequence: Synthetic oligonucleotide
tgagaattactgccatgaatt

SEQ ID NO: 29808 - RNA, 21 nt, synthetic construct
  source 1..21: mol_type = other RNA; note = Description of Artificial Sequence: Synthetic oligonucleotide
tcgagaattactgccatgatt

SEQ ID NO: 29809 - RNA, 21 nt, synthetic construct
  source 1..21: mol_type = other RNA; note = Description of Artificial Sequence: Synthetic oligonucleotide
tccgagaattactgccatgtt

SEQ ID NO: 29810 - RNA, 21 nt, synthetic construct
  source 1..21: mol_type = other RNA; note = Description of Artificial Sequence: Synthetic oligonucleotide
tgccgagaattactgccattt

SEQ ID NO: 29811 - RNA, 21 nt, synthetic construct
  source 1..21: mol_type = other RNA; note = Description of Artificial Sequence: Synthetic oligonucleotide
tagccgagaattactgccatt

SEQ ID NO: 29812 - RNA, 21 nt, synthetic construct
  source 1..21: mol_type = other RNA; note = Description of Artificial Sequence: Synthetic oligonucleotide
tcagccgagaattactgcctt

SEQ ID NO: 29813 - RNA, 21 nt, synthetic construct
  source 1..21: mol_type = other RNA; note = Description of Artificial Sequence: Synthetic oligonucleotide
tacagccgagaattactgctt

SEQ ID NO: 29814 - RNA, 21 nt, synthetic construct
  source 1..21: mol_type = other RNA; note = Description of Artificial Sequence: Synthetic oligonucleotide
ttacagccgagaattactgtt

SEQ ID NO: 29815 - RNA, 21 nt, synthetic construct
  source 1..21: mol_type = other RNA; note = Description of Artificial Sequence: Synthetic oligonucleotide
tctacagccgagaattacttt

SEQ ID NO: 29816 - RNA, 21 nt, synthetic construct
  source 1..21: mol_type = other RNA; note = Description of Artificial Sequence: Synthetic oligonucleotide
tactacagccgagaattactt

SEQ ID NO: 29817 - RNA, 21 nt, synthetic construct
  source 1..21: mol_type = other RNA; note = Description of Artificial Sequence: Synthetic oligonucleotide
taactacagccgagaattatt

SEQ ID NO: 29818 - RNA, 21 nt, synthetic construct
  source 1..21: mol_type = other RNA; note = Description of Artificial Sequence: Synthetic oligonucleotide
tcaactacagccgagaatttt

SEQ ID NO: 29819 - RNA, 21 nt, synthetic construct
  source 1..21: mol_type = other RNA; note = Description of Artificial Sequence: Synthetic oligonucleotide
tgcaactacagccgagaattt

SEQ ID NO: 29820 - RNA, 21 nt, synthetic construct
  source 1..21: mol_type = other RNA; note = Description of Artificial Sequence: Synthetic oligonucleotide
ttgcaactacagccgagaatt

SEQ ID NO: 29821 - RNA, 21 nt, synthetic construct
  source 1..21: mol_type = other RNA; note = Description of Artificial Sequence: Synthetic oligonucleotide
tatgcaactacagccgagatt

SEQ ID NO: 29822 - RNA, 21 nt, synthetic construct
  source 1..21: mol_type = other RNA; note = Description of Artificial Sequence: Synthetic oligonucleotide
ttatgcaactacagccgagtt

SEQ ID NO: 29823 - RNA, 21 nt, synthetic construct
  source 1..21: mol_type = other RNA; note = Description of Artificial Sequence: Synthetic oligonucleotide
tttatgcaactacagccgatt

SEQ ID NO: 29824 - RNA, 21 nt, synthetic construct
  source 1..21: mol_type = other RNA; note = Description of Artificial Sequence: Synthetic oligonucleotide
tcttatgcaactacagccgtt

SEQ ID NO: 29825 - RNA, 21 nt, synthetic construct
  source 1..21: mol_type = other RNA; note = Description of Artificial Sequence: Synthetic oligonucleotide
tgcttatgcaactacagcctt

SEQ ID NO: 29826 - RNA, 21 nt, synthetic construct
  source 1..21: mol_type = other RNA; note = Description of Artificial Sequence: Synthetic oligonucleotide
ttgcttatgcaactacagctt

SEQ ID NO: 29827 - RNA, 21 nt, synthetic construct
  source 1..21: mol_type = other RNA; note = Description of Artificial Sequence: Synthetic oligonucleotide
tatgcttatgcaactacagtt

SEQ ID NO: 29828 - RNA, 21 nt, synthetic construct
  source 1..21: mol_type = other RNA; note = Description of Artificial Sequence: Synthetic oligonucleotide
taatgcttatgcaactacatt

SEQ ID NO: 29829 - RNA, 21 nt, synthetic construct
  source 1..21: mol_type = other RNA; note = Description of Artificial Sequence: Synthetic oligonucleotide
tcaatgcttatgcaactactt

SEQ ID NO: 29830 - RNA, 21 nt, synthetic construct
  source 1..21: mol_type = other RNA; note = Description of Artificial Sequence: Synthetic oligonucleotide
tgcaatgcttatgcaactatt

SEQ ID NO: 29831 - RNA, 21 nt, synthetic construct
  source 1..21: mol_type = other RNA; note = Description of Artificial Sequence: Synthetic oligonucleotide
tagcaatgcttatgcaacttt

SEQ ID NO: 29832 - RNA, 21 nt, synthetic construct
  source 1..21: mol_type = other RNA; note = Description of Artificial Sequence: Synthetic oligonucleotide
tgagcaatgcttatgcaactt

SEQ ID NO: 29833 - RNA, 21 nt, synthetic construct
  source 1..21: mol_type = other RNA; note = Description of Artificial Sequence: Synthetic oligonucleotide
ttgagcaatgcttatgcaatt

SEQ ID NO: 29834 - RNA, 21 nt, synthetic construct
  source 1..21: mol_type = other RNA; note = Description of Artificial Sequence: Synthetic oligonucleotide
tttgagcaatgcttatgcatt

SEQ ID NO: 29835 - RNA, 21 nt, synthetic construct
  source 1..21: mol_type = other RNA; note = Description of Artificial Sequence: Synthetic oligonucleotide
tcttgagcaatgcttatgctt

SEQ ID NO: 29836 - RNA, 21 nt, synthetic construct
  source 1..21: mol_type = other RNA; note = Description of Artificial Sequence: Synthetic oligonucleotide
ttcttgagcaatgcttatgtt

SEQ ID NO: 29837 - RNA, 21 nt, synthetic construct
  source 1..21: mol_type = other RNA; note = Description of Artificial Sequence: Synthetic oligonucleotide
tctcttgagcaatgcttattt

SEQ ID NO: 29838 - RNA, 21 nt, synthetic construct
  source 1..21: mol_type = other RNA; note = Description of Artificial Sequence: Synthetic oligonucleotide
tcctcttgagcaatgcttatt

SEQ ID NO: 29839 - RNA, 21 nt, synthetic construct
  source 1..21: mol_type = other RNA; note = Description of Artificial Sequence: Synthetic oligonucleotide
ttcctcttgagcaatgctttt

SEQ ID NO: 29840 - RNA, 21 nt, synthetic construct
  source 1..21: mol_type = other RNA; note = Description of Artificial Sequence: Synthetic oligonucleotide
tttcctcttgagcaatgcttt

SEQ ID NO: 29841 - RNA, 21 nt, synthetic construct
  source 1..21: mol_type = other RNA; note = Description of Artificial Sequence: Synthetic oligonucleotide
ttttcctcttgagcaatgctt

SEQ ID NO: 29842 - RNA, 21 nt, synthetic construct
  source 1..21: mol_type = other RNA; note = Description of Artificial Sequence: Synthetic oligonucleotide
tttttcctcttgagcaatgtt

SEQ ID NO: 29843 - RNA, 21 nt, synthetic construct
  source 1..21: mol_type = other RNA; note = Description of Artificial Sequence: Synthetic oligonucleotide
tattttcctcttgagcaattt

SEQ ID NO: 29844 - RNA, 21 nt, synthetic construct
  source 1..21: mol_type = other RNA; note = Description of Artificial Sequence: Synthetic oligonucleotide
tgattttcctcttgagcaatt

SEQ ID NO: 29845 - RNA, 21 nt, synthetic construct
  source 1..21: mol_type = other RNA; note = Description of Artificial Sequence: Synthetic oligonucleotide
tggattttcctcttgagcatt

SEQ ID NO: 29846 - RNA, 21 nt, synthetic construct
  source 1..21: mol_type = other RNA; note = Description of Artificial Sequence: Synthetic oligonucleotide
ttggattttcctcttgagctt

SEQ ID NO: 29847 - RNA, 21 nt, synthetic construct
  source 1..21: mol_type = other RNA; note = Description of Artificial Sequence: Synthetic oligonucleotide
tttggattttcctcttgagtt

SEQ ID NO: 29848 - RNA, 21 nt, synthetic construct
  source 1..21: mol_type = other RNA; note = Description of Artificial Sequence: Synthetic oligonucleotide
ttttggattttcctcttgatt

SEQ ID NO: 29849 - RNA, 21 nt, synthetic construct
  source 1..21: mol_type = other RNA; note = Description of Artificial Sequence: Synthetic oligonucleotide
tttttggattttcctcttgtt

SEQ ID NO: 29850 - RNA, 21 nt, synthetic construct
  source 1..21: mol_type = other RNA; note = Description of Artificial Sequence: Synthetic oligonucleotide
tcttttggattttcctctttt

SEQ ID NO: 29851 - RNA, 21 nt, synthetic construct
  source 1..21: mol_type = other RNA; note = Description of Artificial Sequence: Synthetic oligonucleotide
tacttttggattttcctcttt

SEQ ID NO: 29852 - RNA, 21 nt, synthetic construct
  source 1..21: mol_type = other RNA; note = Description of Artificial Sequence: Synthetic oligonucleotide
tcacttttggattttcctctt

SEQ ID NO: 29853 - RNA, 21 nt, synthetic construct
  source 1..21: mol_type = other RNA; note = Description of Artificial Sequence: Synthetic oligonucleotide
tgcacttttggattttccttt

SEQ ID NO: 29854 - RNA, 21 nt, synthetic construct
  source 1..21: mol_type = other RNA; note = Description of Artificial Sequence: Synthetic oligonucleotide
ttgcacttttggattttcctt

SEQ ID NO: 29855 - RNA, 21 nt, synthetic construct
  source 1..21: mol_type = other RNA; note = Description of Artificial Sequence: Synthetic oligonucleotide
tctgcacttttggattttctt

SEQ ID NO: 29856 - RNA, 21 nt, synthetic construct
  source 1..21: mol_type = other RNA; note = Description of Artificial Sequence: Synthetic oligonucleotide
tgctgcacttttggatttttt

SEQ ID NO: 29857 - RNA, 21 nt, synthetic construct
  source 1..21: mol_type = other RNA; note = Description of Artificial Sequence: Synthetic oligonucleotide
ttgctgcacttttggattttt

SEQ ID NO: 29858 - RNA, 21 nt, synthetic construct
  source 1..21: mol_type = other RNA; note = Description of Artificial Sequence: Synthetic oligonucleotide
tctgctgcacttttggatttt

SEQ ID NO: 29859 - RNA, 21 nt, synthetic construct
  source 1..21: mol_type = other RNA; note = Description of Artificial Sequence: Synthetic oligonucleotide
tcctgctgcacttttggattt

SEQ ID NO: 29860 - RNA, 21 nt, synthetic construct
  source 1..21: mol_type = other RNA; note = Description of Artificial Sequence: Synthetic oligonucleotide
ttcctgctgcacttttggatt

SEQ ID NO: 29861 - RNA, 21 nt, synthetic construct
  source 1..21: mol_type = other RNA; note = Description of Artificial Sequence: Synthetic oligonucleotide
tctcctgctgcacttttggtt

SEQ ID NO: 29862 - RNA, 21 nt, synthetic construct
  source 1..21: mol_type = other RNA; note = Description of Artificial Sequence: Synthetic oligonucleotide
ttctcctgctgcacttttgtt

SEQ ID NO: 29863 - RNA, 21 nt, synthetic construct
  source 1..21: mol_type = other RNA; note = Description of Artificial Sequence: Synthetic oligonucleotide
tttctcctgctgcactttttt

SEQ ID NO: 29864 - RNA, 21 nt, synthetic construct
  source 1..21: mol_type = other RNA; note = Description of Artificial Sequence: Synthetic oligonucleotide
tgttctcctgctgcacttttt

SEQ ID NO: 29865 - RNA, 21 nt, synthetic construct
  source 1..21: mol_type = other RNA; note = Description of Artificial Sequence: Synthetic oligonucleotide
tagttctcctgctgcactttt

SEQ ID NO: 29866 - RNA, 21 nt, synthetic construct
  source 1..21: mol_type = other RNA; note = Description of Artificial Sequence: Synthetic oligonucleotide
tgagttctcctgctgcacttt

SEQ ID NO: 29867 - RNA, 21 nt, synthetic construct
  source 1..21: mol_type = other RNA; note = Description of Artificial Sequence: Synthetic oligonucleotide
tagagttctcctgctgcactt

SEQ ID NO: 29868 - RNA, 21 nt, synthetic construct
  source 1..21: mol_type = other RNA; note = Description of Artificial Sequence: Synthetic oligonucleotide
taagagttctcctgctgcatt

SEQ ID NO: 29869 - RNA, 21 nt, synthetic construct
  source 1..21: mol_type = other RNA; note = Description of Artificial Sequence: Synthetic oligonucleotide
taaagagttctcctgctgctt

SEQ ID NO: 29870 - RNA, 21 nt, synthetic construct
  source 1..21: mol_type = other RNA; note = Description of Artificial Sequence: Synthetic oligonucleotide
taaaagagttctcctgctgtt

SEQ ID NO: 29871 - RNA, 21 nt, synthetic construct
  source 1..21: mol_type = other RNA; note = Description of Artificial Sequence: Synthetic oligonucleotide
tgaaaagagttctcctgcttt

SEQ ID NO: 29872 - RNA, 21 nt, synthetic construct
  source 1..21: mol_type = other RNA; note = Description of Artificial Sequence: Synthetic oligonucleotide
tggaaaagagttctcctgctt

SEQ ID NO: 29873 - RNA, 21 nt, synthetic construct
  source 1..21: mol_type = other RNA; note = Description of Artificial Sequence: Synthetic oligonucleotide
tgggaaaagagttctcctgtt

SEQ ID NO: 29874 - RNA, 21 nt, synthetic construct
  source 1..21: mol_type = other RNA; note = Description of Artificial Sequence: Synthetic oligonucleotide
tagggaaaagagttctccttt

SEQ ID NO: 29875 - RNA, 21 nt, synthetic construct
  source 1..21: mol_type = other RNA; note = Description of Artificial Sequence: Synthetic oligonucleotide
tcagggaaaagagttctcctt

SEQ ID NO: 29876 - RNA, 21 nt, synthetic construct
  source 1..21: mol_type = other RNA; note = Description of Artificial Sequence: Synthetic oligonucleotide
ttcagggaaaagagttctctt

SEQ ID NO: 29877 - RNA, 21 nt, synthetic construct
  source 1..21: mol_type = other RNA; note = Description of Artificial Sequence: Synthetic oligonucleotide
tttcagggaaaagagttcttt

SEQ ID NO: 29878 - RNA, 21 nt, synthetic construct
  source 1..21: mol_type = other RNA; note = Description of Artificial Sequence: Synthetic oligonucleotide
ttttcagggaaaagagttctt

SEQ ID NO: 29879 - RNA, 21 nt, synthetic construct
  source 1..21: mol_type = other RNA; note = Description of Artificial Sequence: Synthetic oligonucleotide
tttttcagggaaaagagtttt

SEQ ID NO: 29880 - RNA, 21 nt, synthetic construct
  source 1..21: mol_type = other RNA; note = Description of Artificial Sequence: Synthetic oligonucleotide
ttttttcagggaaaagagttt

SEQ ID NO: 29881 - RNA, 21 nt, synthetic construct
  source 1..21: mol_type = other RNA; note = Description of Artificial Sequence: Synthetic oligonucleotide
tctttttcagggaaaagagtt

SEQ ID NO: 29882 - RNA, 21 nt, synthetic construct
  source 1..21: mol_type = other RNA; note = Description of Artificial Sequence: Synthetic oligonucleotide
tcctttttcagggaaaagatt

SEQ ID NO: 29883 - RNA, 21 nt, synthetic construct
  source 1..21: mol_type = other RNA; note = Description of Artificial Sequence: Synthetic oligonucleotide
ttcctttttcagggaaaagtt

SEQ ID NO: 29884 - RNA, 21 nt, synthetic construct
  source 1..21: mol_type = other RNA; note = Description of Artificial Sequence: Synthetic oligonucleotide
tttcctttttcagggaaaatt

SEQ ID NO: 29885 - RNA, 21 nt, synthetic construct
  source 1..21: mol_type = other RNA; note = Description of Artificial Sequence: Synthetic oligonucleotide
ttttcctttttcagggaaatt

SEQ ID NO: 29886 - RNA, 21 nt, synthetic construct
  source 1..21: mol_type = other RNA; note = Description of Artificial Sequence: Synthetic oligonucleotide
tttttcctttttcagggaatt

SEQ ID NO: 29887 - RNA, 21 nt, synthetic construct
  source 1..21: mol_type = other RNA; note = Description of Artificial Sequence: Synthetic oligonucleotide
ttttttcctttttcagggatt

SEQ ID NO: 29888 - RNA, 21 nt, synthetic construct
  source 1..21: mol_type = other RNA; note = Description of Artificial Sequence: Synthetic oligonucleotide
tatttttcctttttcagggtt

SEQ ID NO: 29889 - RNA, 21 nt, synthetic construct
  source 1..21: mol_type = other RNA; note = Description of Artificial Sequence: Synthetic oligonucleotide
ttatttttcctttttcaggtt

SEQ ID NO: 29890 - RNA, 21 nt, synthetic construct
  source 1..21: mol_type = other RNA; note = Description of Artificial Sequence: Synthetic oligonucleotide
tatatttttcctttttcagtt

SEQ ID NO: 29891 - RNA, 21 nt, synthetic construct
  source 1..21: mol_type = other RNA; note = Description of Artificial Sequence: Synthetic oligonucleotide
taatatttttcctttttcatt

SEQ ID NO: 29892 - RNA, 21 nt, synthetic construct
  source 1..21: mol_type = other RNA; note = Description of Artificial Sequence: Synthetic oligonucleotide
tcaatatttttcctttttctt

SEQ ID NO: 29893 - RNA, 21 nt, synthetic construct
  source 1..21: mol_type = other RNA; note = Description of Artificial Sequence: Synthetic oligonucleotide
ttcaatatttttccttttttt

SEQ ID NO: 29894 - RNA, 21 nt, synthetic construct
  source 1..21: mol_type = other RNA; note = Description of Artificial Sequence: Synthetic oligonucleotide
tttcaatatttttcctttttt

SEQ ID NO: 29895 - RNA, 21 nt, synthetic construct
  source 1..21: mol_type = other RNA; note = Description of Artificial Sequence: Synthetic oligonucleotide
tgttcaatatttttccttttt

SEQ ID NO: 29896 - RNA, 21 nt, synthetic construct
  source 1..21: mol_type = other RNA; note = Description of Artificial Sequence: Synthetic oligonucleotide
tagttcaatatttttcctttt

SEQ ID NO: 29897 - RNA, 21 nt, synthetic construct
  source 1..21: mol_type = other RNA; note = Description of Artificial Sequence: Synthetic oligonucleotide
tgagttcaatatttttccttt

SEQ ID NO: 29898 - RNA, 21 nt, synthetic construct
  source 1..21: mol_type = other RNA; note = Description of Artificial Sequence: Synthetic oligonucleotide
ttgagttcaatatttttcctt

SEQ ID NO: 29899 - RNA, 21 nt, synthetic construct
  source 1..21: mol_type = other RNA; note = Description of Artificial Sequence: Synthetic oligonucleotide
tttgagttcaatatttttctt

SEQ ID NO: 29900 - RNA, 21 nt, synthetic construct
  source 1..21: mol_type = other RNA; note = Description of Artificial Sequence: Synthetic oligonucleotide
tattgagttcaatattttttt

SEQ ID NO: 29901 - RNA, 21 nt, synthetic construct
  source 1..21: mol_type = other RNA; note = Description of Artificial Sequence: Synthetic oligonucleotide
tcattgagttcaatatttttt

SEQ ID NO: 29902 - RNA, 21 nt, synthetic construct
  source 1..21: mol_type = other RNA; note = Description of Artificial Sequence: Synthetic oligonucleotide
ttcattgagttcaatattttt

SEQ ID NO: 29903 - RNA, 21 nt, synthetic construct
  source 1..21: mol_type = other RNA; note = Description of Artificial Sequence: Synthetic oligonucleotide
tatcattgagttcaatatttt

SEQ ID NO: 29904 - RNA, 21 nt, synthetic construct
  source 1..21: mol_type = other RNA; note = Description of Artificial Sequence: Synthetic oligonucleotide
ttatcattgagttcaatattt

SEQ ID NO: 29905 - RNA, 21 nt, synthetic construct
  source 1..21: mol_type = other RNA; note = Description of Artificial Sequence: Synthetic oligonucleotide
tctatcattgagttcaatatt

SEQ ID NO: 29906 - RNA, 21 nt, synthetic construct
  source 1..21: mol_type = other RNA; note = Description of Artificial Sequence: Synthetic oligonucleotide
tgctatcattgagttcaattt

SEQ ID NO: 29907 - RNA, 21 nt, synthetic construct
  source 1..21: mol_type = other RNA; note = Description of Artificial Sequence: Synthetic oligonucleotide
ttgctatcattgagttcaatt

SEQ ID NO: 29908 - RNA, 21 nt, synthetic construct
  source 1..21: mol_type = other RNA; note = Description of Artificial Sequence: Synthetic oligonucleotide
tgtgctatcattgagttcatt

SEQ ID NO: 29909 - RNA, 21 nt, synthetic construct
  source 1..21: mol_type = other RNA; note = Description of Artificial Sequence: Synthetic oligonucleotide
tggtgctatcattgagttctt

SEQ ID NO: 29910 - RNA, 21 nt, synthetic construct
  source 1..21: mol_type = other RNA; note = Description of Artificial Sequence: Synthetic oligonucleotide
taggtgctatcattgagtttt

SEQ ID NO: 29911 - RNA, 21 nt, synthetic construct
  source 1..21: mol_type = other RNA; note = Description of Artificial Sequence: Synthetic oligonucleotide
ttaggtgctatcattgagttt

SEQ ID NO: 29912 - RNA, 21 nt, synthetic construct
  source 1..21: mol_type = other RNA; note = Description of Artificial Sequence: Synthetic oligonucleotide
tttaggtgctatcattgagtt

SEQ ID NO: 29913 - RNA, 21 nt, synthetic construct
  source 1..21: mol_type = other RNA; note = Description of Artificial Sequence: Synthetic oligonucleotide
ttttaggtgctatcattgatt

SEQ ID NO: 29914 - RNA, 21 nt, synthetic construct
  source 1..21: mol_type = other RNA; note = Description of Artificial Sequence: Synthetic oligonucleotide
tgtttaggtgctatcattgtt

SEQ ID NO: 29915 - RNA, 21 nt, synthetic construct
  source 1..21: mol_type = other RNA; note = Description of Artificial Sequence: Synthetic oligonucleotide
tagtttaggtgctatcatttt

SEQ ID NO: 29916 - RNA, 21 nt, synthetic construct
  source 1..21: mol_type = other RNA; note = Description of Artificial Sequence: Synthetic oligonucleotide
taagtttaggtgctatcattt

SEQ ID NO: 29917 - RNA, 21 nt, synthetic construct
  source 1..21: mol_type = other RNA; note = Description of Artificial Sequence: Synthetic oligonucleotide
ttaagtttaggtgctatcatt

SEQ ID NO: 29918 - RNA, 21 nt, synthetic construct
  source 1..21: mol_type = other RNA; note = Description of Artificial Sequence: Synthetic oligonucleotide
tgtaagtttaggtgctatctt

SEQ ID NO: 29919 - RNA, 21 nt, synthetic construct
  source 1..21: mol_type = other RNA; note = Description of Artificial Sequence: Synthetic oligonucleotide
ttgtaagtttaggtgctattt

SEQ ID NO: 29920 - RNA, 21 nt, synthetic construct
  source 1..21: mol_type = other RNA; note = Description of Artificial Sequence: Synthetic oligonucleotide
tatgtaagtttaggtgctatt

SEQ ID NO: 29921 - RNA, 21 nt, synthetic construct
  source 1..21: mol_type = other RNA; note = Description of Artificial Sequence: Synthetic oligonucleotide
taatgtaagtttaggtgcttt

SEQ ID NO: 29922 - RNA, 21 nt, synthetic construct
  source 1..21: mol_type = other RNA; note = Description of Artificial Sequence: Synthetic oligonucleotide
taaatgtaagtttaggtgctt

SEQ ID NO: 29923 - RNA, 21 nt, synthetic construct
  source 1..21: mol_type = other RNA; note = Description of Artificial Sequence: Synthetic oligonucleotide
ttaaatgtaagtttaggtgtt

SEQ ID NO: 29924 - RNA, 21 nt, synthetic construct
  source 1..21: mol_type = other RNA; note = Description of Artificial Sequence: Synthetic oligonucleotide
tttaaatgtaagtttaggttt

SEQ ID NO: 29925 - RNA, 21 nt, synthetic construct
  source 1..21: mol_type = other RNA; note = Description of Artificial Sequence: Synthetic oligonucleotide
ttttaaatgtaagtttaggtt

SEQ ID NO: 29926 - RNA, 21 nt, synthetic construct
  source 1..21: mol_type = other RNA; note = Description of Artificial Sequence: Synthetic oligonucleotide
tttttaaatgtaagtttagtt

SEQ ID NO: 29927 - RNA, 21 nt, synthetic construct
  source 1..21: mol_type = other RNA; note = Description of Artificial Sequence: Synthetic oligonucleotide
tcttttaaatgtaagtttatt

SEQ ID NO: 29928 - RNA, 21 nt, synthetic construct
  source 1..21: mol_type = other RNA; note = Description of Artificial Sequence: Synthetic oligonucleotide
ttcttttaaatgtaagttttt

SEQ ID NO: 29929 - RNA, 21 nt, synthetic construct
  source 1..21: mol_type = other RNA; note = Description of Artificial Sequence: Synthetic oligonucleotide
tgtcttttaaatgtaagtttt

SEQ ID NO: 29930 - RNA, 21 nt, synthetic construct
  source 1..21: mol_type = other RNA; note = Description of Artificial Sequence: Synthetic oligonucleotide
ttgtcttttaaatgtaagttt

SEQ ID NO: 29931 - RNA, 21 nt, synthetic construct
  source 1..21: mol_type = other RNA; note = Description of Artificial Sequence: Synthetic oligonucleotide
tctgtcttttaaatgtaagtt

SEQ ID NO: 29932 - RNA, 21 nt, synthetic construct
  source 1..21: mol_type = other RNA; note = Description of Artificial Sequence: Synthetic oligonucleotide
ttctgtcttttaaatgtaatt

SEQ ID NO: 29933 - RNA, 21 nt, synthetic construct
  source 1..21: mol_type = other RNA; note = Description of Artificial Sequence: Synthetic oligonucleotide
tgtctgtcttttaaatgtatt

SEQ ID NO: 29934 - RNA, 21 nt, synthetic construct
  source 1..21: mol_type = other RNA; note = Description of Artificial Sequence: Synthetic oligonucleotide
ttgtctgtcttttaaatgttt

SEQ ID NO: 29935 - RNA, 21 nt, synthetic construct
  source 1..21: mol_type = other RNA; note = Description of Artificial Sequence: Synthetic oligonucleotide
tatgtctgtcttttaaatgtt

SEQ ID NO: 29936 - RNA, 21 nt, synthetic construct
  source 1..21: mol_type = other RNA; note = Description of Artificial Sequence: Synthetic oligonucleotide
taatgtctgtcttttaaattt

SEQ ID NO: 29937 - RNA, 21 nt, synthetic construct
  source 1..21: mol_type = other RNA; note = Description of Artificial Sequence: Synthetic oligonucleotide
tgaatgtctgtcttttaaatt

SEQ ID NO: 29938 - RNA, 21 nt, synthetic construct
  source 1..21: mol_type = other RNA; note = Description of Artificial Sequence: Synthetic oligonucleotide
tggaatgtctgtcttttaatt

SEQ ID NO: 29939 - RNA, 21 nt, synthetic construct
  source 1..21: mol_type = other RNA; note = Description of Artificial Sequence: Synthetic oligonucleotide
taggaatgtctgtcttttatt

SEQ ID NO: 29940 - RNA, 21 nt, synthetic construct
  source 1..21: mol_type = other RNA; note = Description of Artificial Sequence: Synthetic oligonucleotide
taaggaatgtctgtctttttt

SEQ ID NO: 29941 - RNA, 21 nt, synthetic construct
  source 1..21: mol_type = other RNA; note = Description of Artificial Sequence: Synthetic oligonucleotide
tgaaggaatgtctgtcttttt

SEQ ID NO: 29942 - RNA, 21 nt, synthetic construct
  source 1..21: mol_type = other RNA; note = Description of Artificial Sequence: Synthetic oligonucleotide
tagaaggaatgtctgtctttt

SEQ ID NO: 29943 - RNA, 21 nt, synthetic construct
  source 1..21: mol_type = other RNA; note = Description of Artificial Sequence: Synthetic oligonucleotide
ttagaaggaatgtctgtcttt

SEQ ID NO: 29944 - RNA, 21 nt, synthetic construct
  source 1..21: mol_type = other RNA; note = Description of Artificial Sequence: Synthetic oligonucleotide
tgtagaaggaatgtctgtctt

SEQ ID NO: 29945 - RNA, 21 nt, synthetic construct
  source 1..21: mol_type = other RNA; note = Description of Artificial Sequence: Synthetic oligonucleotide
ttgtagaaggaatgtctgttt

SEQ ID NO: 29946 - RNA, 21 nt, synthetic construct
  source 1..21: mol_type = other RNA; note = Description of Artificial Sequence: Synthetic oligonucleotide
tatgtagaaggaatgtctgtt

SEQ ID NO: 29947 - RNA, 21 nt, synthetic construct
  source 1..21: mol_type = other RNA; note = Description of Artificial Sequence: Synthetic oligonucleotide
tcatgtagaaggaatgtcttt

SEQ ID NO: 29948 - RNA, 21 nt, synthetic construct
  source 1..21: mol_type = other RNA; note = Description of Artificial Sequence: Synthetic oligonucleotide
tacatgtagaaggaatgtctt

SEQ ID NO: 29949 - RNA, 21 nt, synthetic construct
  source 1..21: mol_type = other RNA; note = Description of Artificial Sequence: Synthetic oligonucleotide
ttacatgtagaaggaatgttt

SEQ ID NO: 29950 - RNA, 21 nt, synthetic construct
  source 1..21: mol_type = other RNA; note = Description of Artificial Sequence: Synthetic oligonucleotide
tttacatgtagaaggaatgtt

SEQ ID NO: 29951 - RNA, 21 nt, synthetic construct
  source 1..21: mol_type = other RNA; note = Description of Artificial Sequence: Synthetic oligonucleotide
tattacatgtagaaggaattt

SEQ ID NO: 29952 - RNA, 21 nt, synthetic construct
  source 1..21: mol_type = other RNA; note = Description of Artificial Sequence: Synthetic oligonucleotide
tcattacatgtagaaggaatt

SEQ ID NO: 29953 - RNA, 21 nt, synthetic construct
  source 1..21: mol_type = other RNA; note = Description of Artificial Sequence: Synthetic oligonucleotide
ttcattacatgtagaaggatt

SEQ ID NO: 29954 - RNA, 21 nt, synthetic construct
  source 1..21: mol_type = other RNA; note = Description of Artificial Sequence: Synthetic oligonucleotide
tgtcattacatgtagaaggtt

SEQ ID NO: 29955 - RNA, 21 nt, synthetic construct
  source 1..21: mol_type = other RNA; note = Description of Artificial Sequence: Synthetic oligonucleotide
ttgtcattacatgtagaagtt

SEQ ID NO: 29956 - RNA, 21 nt, synthetic construct
  source 1..21: mol_type = other RNA; note = Description of Artificial Sequence: Synthetic oligonucleotide
tgtgtcattacatgtagaatt

SEQ ID NO: 29957 - RNA, 21 nt, synthetic construct
  source 1..21: mol_type = other RNA; note = Description of Artificial Sequence: Synthetic oligonucleotide
tagtgtcattacatgtagatt

SEQ ID NO: 29958 - RNA, 21 nt, synthetic construct
  source 1..21: mol_type = other RNA; note = Description of Artificial Sequence: Synthetic oligonucleotide
taagtgtcattacatgtagtt

SEQ ID NO: 29959 - RNA, 21 nt, synthetic construct
  source 1..21: mol_type = other RNA; note = Description of Artificial Sequence: Synthetic oligonucleotide
tgaagtgtcattacatgtatt

SEQ ID NO: 29960 - RNA, 21 nt, synthetic construct
  source 1..21: mol_type = other RNA; note = Description of Artificial Sequence: Synthetic oligonucleotide
tagaagtgtcattacatgttt

SEQ ID NO: 29961 - RNA, 21 nt, synthetic construct
  source 1..21: mol_type = other RNA; note = Description of Artificial Sequence: Synthetic oligonucleotide
taagaagtgtcattacatgtt

SEQ ID NO: 29962 - RNA, 21 nt, synthetic construct
  source 1..21: mol_type = other RNA; note = Description of Artificial Sequence: Synthetic oligonucleotide
tcaagaagtgtcattacattt

SEQ ID NO: 29963 - RNA, 21 nt, synthetic construct
  source 1..21: mol_type = other RNA; note = Description of Artificial Sequence: Synthetic oligonucleotide
tacaagaagtgtcattacatt

SEQ ID NO: 29964 - RNA, 21 nt, synthetic construct
  source 1..21: mol_type = other RNA; note = Description of Artificial Sequence: Synthetic oligonucleotide
tcacaagaagtgtcattactt

SEQ ID NO: 29965 - RNA, 21 nt, synthetic construct
  source 1..21: mol_type = other RNA; note = Description of Artificial Sequence: Synthetic oligonucleotide
tacacaagaagtgtcattatt

SEQ ID NO: 29966 - RNA, 21 nt, synthetic construct
  source 1..21: mol_type = other RNA; note = Description of Artificial Sequence: Synthetic oligonucleotide
taacacaagaagtgtcatttt

SEQ ID NO: 29967 - RNA, 21 nt, synthetic construct
  source 1..21: mol_type = other RNA; note = Description of Artificial Sequence: Synthetic oligonucleotide
ttaacacaagaagtgtcattt

SEQ ID NO: 29968 - RNA, 21 nt, synthetic construct
  source 1..21: mol_type = other RNA; note = Description of Artificial Sequence: Synthetic oligonucleotide
tttaacacaagaagtgtcatt

SEQ ID NO: 29969 - RNA, 21 nt, synthetic construct
  source 1..21: mol_type = other RNA; note = Description of Artificial Sequence: Synthetic oligonucleotide
ttttaacacaagaagtgtctt

SEQ ID NO: 29970 - RNA, 21 nt, synthetic construct
  source 1..21: mol_type = other RNA; note = Description of Artificial Sequence: Synthetic oligonucleotide
tgtttaacacaagaagtgttt

SEQ ID NO: 29971 - RNA, 21 nt, synthetic construct
  source 1..21: mol_type = other RNA; note = Description of Artificial Sequence: Synthetic oligonucleotide
tagtttaacacaagaagtgtt

SEQ ID NO: 29972 - RNA, 21 nt, synthetic construct
  source 1..21: mol_type = other RNA; note = Description of Artificial Sequence: Synthetic oligonucleotide
ttagtttaacacaagaagttt

SEQ ID NO: 29973 - RNA, 21 nt, synthetic construct
  source 1..21: mol_type = other RNA; note = Description of Artificial Sequence: Synthetic oligonucleotide
tttagtttaacacaagaagtt

SEQ ID NO: 29974 - RNA, 21 nt, synthetic construct
  source 1..21: mol_type = other RNA; note = Description of Artificial Sequence: Synthetic oligonucleotide
ttttagtttaacacaagaatt

SEQ ID NO: 29975 - RNA, 21 nt, synthetic construct
  source 1..21: mol_type = other RNA; note = Description of Artificial Sequence: Synthetic oligonucleotide
tttttagtttaacacaagatt

SEQ ID NO: 29976 - RNA, 21 nt, synthetic construct
  source 1..21: mol_type = other RNA; note = Description of Artificial Sequence: Synthetic oligonucleotide
ttttttagtttaacacaagtt

SEQ ID NO: 29977 - RNA, 21 nt, synthetic construct
  source 1..21: mol_type = other RNA; note = Description of Artificial Sequence: Synthetic oligonucleotide
tatttttagtttaacacaatt

SEQ ID NO: 29978 - RNA, 21 nt, synthetic construct
  source 1..21: mol_type = other RNA; note = Description of Artificial Sequence: Synthetic oligonucleotide
taatttttagtttaacacatt

SEQ ID NO: 29979 - RNA, 21 nt, synthetic construct
  source 1..21: mol_type = other RNA; note = Description of Artificial Sequence: Synthetic oligonucleotide
taaatttttagtttaacactt

SEQ ID NO: 29980 - RNA, 21 nt, synthetic construct
  source 1..21: mol_type = other RNA; note = Description of Artificial Sequence: Synthetic oligonucleotide
ttaaatttttagtttaacatt

SEQ ID NO: 29981 - RNA, 21 nt, synthetic construct
  source 1..21: mol_type = other RNA; note = Description of Artificial Sequence: Synthetic oligonucleotide
tgtaaatttttagtttaactt

SEQ ID NO: 29982 - RNA, 21 nt, synthetic construct
  source 1..21: mol_type = other RNA; note = Description of Artificial Sequence: Synthetic oligonucleotide
ttgtaaatttttagtttaatt

SEQ ID NO: 29983 - RNA, 21 nt, synthetic construct
  source 1..21: mol_type = other RNA; note = Description of Artificial Sequence: Synthetic oligonucleotide
tttgtaaatttttagtttatt

SEQ ID NO: 29984 - RNA, 21 nt, synthetic construct
  source 1..21: mol_type = other RNA; note = Description of Artificial Sequence: Synthetic oligonucleotide
tcttgtaaatttttagttttt

SEQ ID NO: 29985 - RNA, 21 nt, synthetic construct
  source 1..21: mol_type = other RNA; note = Description of Artificial Sequence: Synthetic oligonucleotide
ttcttgtaaatttttagtttt

SEQ ID NO: 29986 - RNA, 21 nt, synthetic construct
  source 1..21: mol_type = other RNA; note = Description of Artificial Sequence: Synthetic oligonucleotide
tctcttgtaaatttttagttt

SEQ ID NO: 29987 - RNA, 21 nt, synthetic construct
  source 1..21: mol_type = other RNA; note = Description of Artificial Sequence: Synthetic oligonucleotide
ttctcttgtaaatttttagtt

SEQ ID NO: 29988 - RNA, 21 nt, synthetic construct
  source 1..21: mol_type = other RNA; note = Description of Artificial Sequence: Synthetic oligonucleotide
tttctcttgtaaatttttatt

SEQ ID NO: 29989 - RNA, 21 nt, synthetic construct
  source 1..21: mol_type = other RNA; note = Description of Artificial Sequence: Synthetic oligonucleotide
tcttctcttgtaaattttttt

SEQ ID NO: 29990 - RNA, 21 nt, synthetic construct
  source 1..21: mol_type = other RNA; note = Description of Artificial Sequence: Synthetic oligonucleotide
ttcttctcttgtaaatttttt

SEQ ID NO: 29991 - RNA, 21 nt, synthetic construct
  source 1..21: mol_type = other RNA; note = Description of Artificial Sequence: Synthetic oligonucleotide
tttcttctcttgtaaattttt

SEQ ID NO: 29992 - RNA, 21 nt, synthetic construct
  source 1..21: mol_type = other RNA; note = Description of Artificial Sequence: Synthetic oligonucleotide
ttttcttctcttgtaaatttt

SEQ ID NO: 29993 - RNA, 21 nt, synthetic construct
  source 1..21: mol_type = other RNA; note = Description of Artificial Sequence: Synthetic oligonucleotide
tctttcttctcttgtaaattt

SEQ ID NO: 29994 - RNA, 21 nt, synthetic construct
  source 1..21: mol_type = other RNA; note = Description of Artificial Sequence: Synthetic oligonucleotide
tactttcttctcttgtaaatt

SEQ ID NO: 29995 - RNA, 21 nt, synthetic construct
  source 1..21: mol_type = other RNA; note = Description of Artificial Sequence: Synthetic oligonucleotide
tcactttcttctcttgtaatt

SEQ ID NO: 29996 - RNA, 21 nt, synthetic construct
  source 1..21: mol_type = other RNA; note = Description of Artificial Sequence: Synthetic oligonucleotide
ttcactttcttctcttgtatt

SEQ ID NO: 29997 - RNA, 21 nt, synthetic construct
  source 1..21: mol_type = other RNA; note = Description of Artificial Sequence: Synthetic oligonucleotide
tttcactttcttctcttgttt

SEQ ID NO: 29998 - RNA, 21 nt, synthetic construct
  source 1..21: mol_type = other RNA; note = Description of Artificial Sequence: Synthetic oligonucleotide
ttttcactttcttctcttgtt

SEQ ID NO: 29999 - RNA, 21 nt, synthetic construct
  source 1..21: mol_type = other RNA; note = Description of Artificial Sequence: Synthetic oligonucleotide
tctttcactttcttctctttt

SEQ ID NO: 30000 - RNA, 21 nt, synthetic construct
  source 1..21: mol_type = other RNA; note = Description of Artificial Sequence: Synthetic oligonucleotide
tgctttcactttcttctcttt

SEQ ID NO: 30001 - RNA, 21 nt, synthetic construct
  source 1..21: mol_type = other RNA; note = Description of Artificial Sequence: Synthetic oligonucleotide
ttgctttcactttcttctctt

SEQ ID NO: 30002 - RNA, 21 nt, synthetic construct
  source 1..21: mol_type = other RNA; note = Description of Artificial Sequence: Synthetic oligonucleotide
tttgctttcactttcttcttt

SEQ ID NO: 30003 - RNA, 21 nt, synthetic construct
  source 1..21: mol_type = other RNA; note = Description of Artificial Sequence: Synthetic oligonucleotide
ttttgctttcactttcttctt

SEQ ID NO: 30004 - RNA, 21 nt, synthetic construct
  source 1..21: mol_type = other RNA; note = Description of Artificial Sequence: Synthetic oligonucleotide
tatttgctttcactttctttt

SEQ ID NO: 30005 - RNA, 21 nt, synthetic construct
  source 1..21: mol_type = other RNA; note = Description of Artificial Sequence: Synthetic oligonucleotide
tcatttgctttcactttcttt

SEQ ID NO: 30006 - RNA, 21 nt, synthetic construct
  source 1..21: mol_type = other RNA; note = Description of Artificial Sequence: Synthetic oligonucleotide
tccatttgctttcactttctt

SEQ ID NO: 30007 - RNA, 21 nt, synthetic construct
  source 1..21: mol_type = other RNA; note = Description of Artificial Sequence: Synthetic oligonucleotide
tcccatttgctttcacttttt

SEQ ID NO: 30008 - RNA, 21 nt, synthetic construct
  source 1..21: mol_type = other RNA; note = Description of Artificial Sequence: Synthetic oligonucleotide
tccccatttgctttcactttt

SEQ ID NO: 30009 - RNA, 21 nt, synthetic construct
  source 1..21: mol_type = other RNA; note = Description of Artificial Sequence: Synthetic oligonucleotide
taccccatttgctttcacttt

SEQ ID NO: 30010 - RNA, 21 nt, synthetic construct
  source 1..21: mol_type = other RNA; note = Description of Artificial Sequence: Synthetic oligonucleotide
taaccccatttgctttcactt

SEQ ID NO: 30011 - RNA, 21 nt, synthetic construct
  source 1..21: mol_type = other RNA; note = Description of Artificial Sequence: Synthetic oligonucleotide
taaaccccatttgctttcatt

SEQ ID NO: 30012 - RNA, 21 nt, synthetic construct
  source 1..21: mol_type = other RNA; note = Description of Artificial Sequence: Synthetic oligonucleotide
tgaaaccccatttgctttctt

SEQ ID NO: 30013 - RNA, 21 nt, synthetic construct
  source 1..21: mol_type = other RNA; note = Description of Artificial Sequence: Synthetic oligonucleotide
ttgaaaccccatttgcttttt

SEQ ID NO: 30014 - RNA, 21 nt, synthetic construct
  source 1..21: mol_type = other RNA; note = Description of Artificial Sequence: Synthetic oligonucleotide
tgtgaaaccccatttgctttt

SEQ ID NO: 30015 - RNA, 21 nt, synthetic construct
  source 1..21: mol_type = other RNA; note = Description of Artificial Sequence: Synthetic oligonucleotide
ttgtgaaaccccatttgcttt

SEQ ID NO: 30016 - RNA, 21 nt, synthetic construct
  source 1..21: mol_type = other RNA; note = Description of Artificial Sequence: Synthetic oligonucleotide
tttgtgaaaccccatttgctt

SEQ ID NO: 30017 - RNA, 21 nt, synthetic construct
  source 1..21: mol_type = other RNA; note = Description of Artificial Sequence: Synthetic oligonucleotide
ttttgtgaaaccccatttgtt

SEQ ID NO: 30018 - RNA, 21 nt, synthetic construct
  source 1..21: mol_type = other RNA; note = Description of Artificial Sequence: Synthetic oligonucleotide
tatttgtgaaaccccattttt

SEQ ID NO: 30019 - RNA, 21 nt, synthetic construct
  source 1..21: mol_type = other RNA; note = Description of Artificial Sequence: Synthetic oligonucleotide
ttatttgtgaaaccccatttt

SEQ ID NO: 30020 - RNA, 21 nt, synthetic construct
  source 1..21: mol_type = other RNA; note = Description of Artificial Sequence: Synthetic oligonucleotide
tctatttgtgaaaccccattt

SEQ ID NO: 30021 - RNA, 21 nt, synthetic construct
  source 1..21: mol_type = other RNA; note = Description of Artificial Sequence: Synthetic oligonucleotide
tactatttgtgaaaccccatt

SEQ ID NO: 30022 - RNA, 21 nt, synthetic construct
  source 1..21: mol_type = other RNA; note = Description of Artificial Sequence: Synthetic oligonucleotide
taactatttgtgaaacccctt

SEQ ID NO: 30023 - RNA, 21 nt, synthetic construct
  source 1..21: mol_type = other RNA; note = Description of Artificial Sequence: Synthetic oligonucleotide
tcaactatttgtgaaaccctt

SEQ ID NO: 30024 - RNA, 21 nt, synthetic construct
  source 1..21: mol_type = other RNA; note = Description of Artificial Sequence: Synthetic oligonucleotide
tacaactatttgtgaaacctt

SEQ ID NO: 30025 - RNA, 21 nt, synthetic construct
  source 1..21: mol_type = other RNA; note = Description of Artificial Sequence: Synthetic oligonucleotide
ttacaactatttgtgaaactt

SEQ ID NO: 30026 - RNA, 21 nt, synthetic construct
  source 1..21: mol_type = other RNA; note = Description of Artificial Sequence: Synthetic oligonucleotide
tttacaactatttgtgaaatt

SEQ ID NO: 30027 - RNA, 21 nt, synthetic construct
  source 1..21: mol_type = other RNA; note = Description of Artificial Sequence: Synthetic oligonucleotide
ttttacaactatttgtgaatt

SEQ ID NO: 30028 - RNA, 21 nt, synthetic construct
  source 1..21: mol_type = other RNA; note = Description of Artificial Sequence: Synthetic oligonucleotide
tatttacaactatttgtgatt

SEQ ID NO: 30029 - RNA, 21 nt, synthetic construct
  source 1..21: mol_type = other RNA; note = Description of Artificial Sequence: Synthetic oligonucleotide
ttatttacaactatttgtgtt

SEQ ID NO: 30030 - RNA, 21 nt, synthetic construct
  source 1..21: mol_type = other RNA; note = Description of Artificial Sequence: Synthetic oligonucleotide
tatatttacaactatttgttt

SEQ ID NO: 30031 - RNA, 21 nt, synthetic construct
  source 1..21: mol_type = other RNA; note = Description of Artificial Sequence: Synthetic oligonucleotide
ttatatttacaactatttgtt

SEQ ID NO: 30032 - RNA, 21 nt, synthetic construct
  source 1..21: mol_type = other RNA; note = Description of Artificial Sequence: Synthetic oligonucleotide
tctatatttacaactattttt

SEQ ID NO: 30033 - RNA, 21 nt, synthetic construct
  source 1..21: mol_type = other RNA; note = Description of Artificial Sequence: Synthetic oligonucleotide
tactatatttacaactatttt

SEQ ID NO: 30034 - RNA, 21 nt, synthetic construct
  source 1..21: mol_type = other RNA; note = Description of Artificial Sequence: Synthetic oligonucleotide
tcactatatttacaactattt

SEQ ID NO: 30035 - RNA, 21 nt, synthetic construct
  source 1..21: mol_type = other RNA; note = Description of Artificial Sequence: Synthetic oligonucleotide
ttcactatatttacaactatt

SEQ ID NO: 30036 - RNA, 21 nt, synthetic construct
  source 1..21: mol_type = other RNA; note = Description of Artificial Sequence: Synthetic oligonucleotide
tttcactatatttacaacttt

SEQ ID NO: 30037 - RNA, 21 nt, synthetic construct
  source 1..21: mol_type = other RNA; note = Description of Artificial Sequence: Synthetic oligonucleotide
tcttcactatatttacaactt

SEQ ID NO: 30038 - RNA, 21 nt, synthetic construct
  source 1..21: mol_type = other RNA; note = Description of Artificial Sequence: Synthetic oligonucleotide
tgcttcactatatttacaatt

SEQ ID NO: 30039 - RNA, 21 nt, synthetic construct
  source 1..21: mol_type = other RNA; note = Description of Artificial Sequence: Synthetic oligonucleotide
ttgcttcactatatttacatt

SEQ ID NO: 30040 - RNA, 21 nt, synthetic construct
  source 1..21: mol_type = other RNA; note = Description of Artificial Sequence: Synthetic oligonucleotide
tttgcttcactatatttactt

SEQ ID NO: 30041 - RNA, 21 nt, synthetic construct
  source 1..21: mol_type = other RNA; note = Description of Artificial Sequence: Synthetic oligonucleotide
tattgcttcactatatttatt

SEQ ID NO: 30042 - RNA, 21 nt, synthetic construct
  source 1..21: mol_type = other RNA; note = Description of Artificial Sequence: Synthetic oligonucleotide
taattgcttcactatattttt

SEQ ID NO: 30043 - RNA, 21 nt, synthetic construct
  source 1..21: mol_type = other RNA; note = Description of Artificial Sequence: Synthetic oligonucleotide
taaattgcttcactatatttt

SEQ ID NO: 30044 - RNA, 21 nt, synthetic construct
  source 1..21: mol_type = other RNA; note = Description of Artificial Sequence: Synthetic oligonucleotide
tcaaattgcttcactatattt

SEQ ID NO: 30045 - RNA, 21 nt, synthetic construct
  source 1..21: mol_type = other RNA; note = Description of Artificial Sequence: Synthetic oligonucleotide
ttcaaattgcttcactatatt

SEQ ID NO: 30046 - RNA, 21 nt, synthetic construct
  source 1..21: mol_type = other RNA; note = Description of Artificial Sequence: Synthetic oligonucleotide
tttcaaattgcttcactattt

SEQ ID NO: 30047 - RNA, 21 nt, synthetic construct
  source 1..21: mol_type = other RNA; note = Description of Artificial Sequence: Synthetic oligonucleotide
ttttcaaattgcttcactatt

SEQ ID NO: 30048 - RNA, 21 nt, synthetic construct
  source 1..21: mol_type = other RNA; note = Description of Artificial Sequence: Synthetic oligonucleotide
tatttcaaattgcttcacttt

SEQ ID NO: 30049 - RNA, 21 nt, synthetic construct
  source 1..21: mol_type = other RNA; note = Description of Artificial Sequence: Synthetic oligonucleotide
ttatttcaaattgcttcactt

SEQ ID NO: 30050 - RNA, 21 nt, synthetic construct
  source 1..21: mol_type = other RNA; note = Description of Artificial Sequence: Synthetic oligonucleotide
tttatttcaaattgcttcatt

SEQ ID NO: 30051 - RNA, 21 nt, synthetic construct
  source 1..21: mol_type = other RNA; note = Description of Artificial Sequence: Synthetic oligonucleotide
tattatttcaaattgcttctt

SEQ ID NO: 30052 - RNA, 21 nt, synthetic construct
  source 1..21: mol_type = other RNA; note = Description of Artificial Sequence: Synthetic oligonucleotide
taattatttcaaattgctttt

SEQ ID NO: 30053 - RNA, 21 nt, synthetic construct
  source 1..21: mol_type = other RNA; note = Description of Artificial Sequence: Synthetic oligonucleotide
taaattatttcaaattgcttt

SEQ ID NO: 30054 - RNA, 21 nt, synthetic construct
  source 1..21: mol_type = other RNA; note = Description of Artificial Sequence: Synthetic oligonucleotide
taaaattatttcaaattgctt

SEQ ID NO: 30055 - RNA, 21 nt, synthetic construct
  source 1..21: mol_type = other RNA; note = Description of Artificial Sequence: Synthetic oligonucleotide
tgaaaattatttcaaattgtt

SEQ ID NO: 30056 - RNA, 21 nt, synthetic construct
  source 1..21: mol_type = other RNA; note = Description of Artificial Sequence: Synthetic oligonucleotide
ttgaaaattatttcaaatttt

SEQ ID NO: 30057 - RNA, 21 nt, synthetic construct
  source 1..21: mol_type = other RNA; note = Description of Artificial Sequence: Synthetic oligonucleotide
tttgaaaattatttcaaattt

SEQ ID NO: 30058 - RNA, 21 nt, synthetic construct
  source 1..21: mol_type = other RNA; note = Description of Artificial Sequence: Synthetic oligonucleotide
tcttgaaaattatttcaaatt

SEQ ID NO: 30059 - RNA, 21 nt, synthetic construct
  source 1..21: mol_type = other RNA; note = Description of Artificial Sequence: Synthetic oligonucleotide
tgcttgaaaattatttcaatt

SEQ ID NO: 30060 - RNA, 21 nt, synthetic construct
  source 1..21: mol_type = other RNA; note = Description of Artificial Sequence: Synthetic oligonucleotide
ttgcttgaaaattatttcatt

SEQ ID NO: 30061 - RNA, 21 nt, synthetic construct
  source 1..21: mol_type = other RNA; note = Description of Artificial Sequence: Synthetic oligonucleotide
tttgcttgaaaattatttctt

SEQ ID NO: 30062 - RNA, 21 nt, synthetic construct
  source 1..21: mol_type = other RNA; note = Description of Artificial Sequence: Synthetic oligonucleotide
ttttgcttgaaaattattttt

SEQ ID NO: 30063 - RNA, 21 nt, synthetic construct
  source 1..21: mol_type = other RNA; note = Description of Artificial Sequence: Synthetic oligonucleotide
tctttgcttgaaaattatttt

SEQ ID NO: 30064 - RNA, 21 nt, synthetic construct
  source 1..21: mol_type = other RNA; note = Description of Artificial Sequence: Synthetic oligonucleotide
tactttgcttgaaaattattt

SEQ ID NO: 30065 - RNA, 21 nt, synthetic construct
  source 1..21: mol_type = other RNA; note = Description of Artificial Sequence: Synthetic oligonucleotide
ttactttgcttgaaaattatt

SEQ ID NO: 30066 - RNA, 21 nt, synthetic construct
  source 1..21: mol_type = other RNA; note = Description of Artificial Sequence: Synthetic oligonucleotide
tatactttgcttgaaaatttt

SEQ ID NO: 30067 - RNA, 21 nt, synthetic construct
  source 1..21: mol_type = other RNA; note = Description of Artificial Sequence: Synthetic oligonucleotide
taatactttgcttgaaaattt

SEQ ID NO: 30068 - RNA, 21 nt, synthetic construct
  source 1..21: mol_type = other RNA; note = Description of Artificial Sequence: Synthetic oligonucleotide
tcaatactttgcttgaaaatt

SEQ ID NO: 30069 - RNA, 21 nt, synthetic construct
  source 1..21: mol_type = other RNA; note = Description of Artificial Sequence: Synthetic oligonucleotide
tacaatactttgcttgaaatt

SEQ ID NO: 30070 - RNA, 21 nt, synthetic construct
  source 1..21: mol_type = other RNA; note = Description of Artificial Sequence: Synthetic oligonucleotide
tcacaatactttgcttgaatt

SEQ ID NO: 30071 - RNA, 21 nt, synthetic construct
  source 1..21: mol_type = other RNA; note = Description of Artificial Sequence: Synthetic oligonucleotide
ttcacaatactttgcttgatt

SEQ ID NO: 30072 - RNA, 21 nt, synthetic construct
  source 1..21: mol_type = other RNA; note = Description of Artificial Sequence: Synthetic oligonucleotide
tttcacaatactttgcttgtt

SEQ ID NO: 30073 - RNA, 21 nt, synthetic construct
  source 1..21: mol_type = other RNA; note = Description of Artificial Sequence: Synthetic oligonucleotide
ttttcacaatactttgctttt

SEQ ID NO: 30074 - RNA, 21 nt, synthetic construct
  source 1..21: mol_type = other RNA; note = Description of Artificial Sequence: Synthetic oligonucleotide
tctttcacaatactttgcttt

SEQ ID NO: 30075 - RNA, 21 nt, synthetic construct
  source 1..21: mol_type = other RNA; note = Description of Artificial Sequence: Synthetic oligonucleotide
tactttcacaatactttgctt

SEQ ID NO: 30076 - RNA, 21 nt, synthetic construct
  source 1..21: mol_type = other RNA; note = Description of Artificial Sequence: Synthetic oligonucleotide
ttactttcacaatactttgtt

SEQ ID NO: 30077 - RNA, 21 nt, synthetic construct
  source 1..21: mol_type = other RNA; note = Description of Artificial Sequence: Synthetic oligonucleotide
tatactttcacaatacttttt

SEQ ID NO: 30078 - RNA, 21 nt, synthetic construct
  source 1..21: mol_type = other RNA; note = Description of Artificial Sequence: Synthetic oligonucleotide
taatactttcacaatactttt

SEQ ID NO: 30079 - RNA, 21 nt, synthetic construct
  source 1..21: mol_type = other RNA; note = Description of Artificial Sequence: Synthetic oligonucleotide
tgaatactttcacaatacttt

SEQ ID NO: 30080 - RNA, 21 nt, synthetic construct
  source 1..21: mol_type = other RNA; note = Description of Artificial Sequence: Synthetic oligonucleotide
tagaatactttcacaatactt

SEQ ID NO: 30081 - RNA, 21 nt, synthetic construct
  source 1..21: mol_type = other RNA; note = Description of Artificial Sequence: Synthetic oligonucleotide
ttagaatactttcacaatatt

SEQ ID NO: 30082 - RNA, 21 nt, synthetic construct
  source 1..21: mol_type = other RNA; note = Description of Artificial Sequence: Synthetic oligonucleotide
tttagaatactttcacaattt

SEQ ID NO: 30083 - RNA, 21 nt, synthetic construct
  source 1..21: mol_type = other RNA; note = Description of Artificial Sequence: Synthetic oligonucleotide
tcttagaatactttcacaatt

SEQ ID NO: 30084 - RNA, 21 nt, synthetic construct
  source 1..21: mol_type = other RNA; note = Description of Artificial Sequence: Synthetic oligonucleotide
tgcttagaatactttcacatt

SEQ ID NO: 30085 - RNA, 21 nt, synthetic construct
  source 1..21: mol_type = other RNA; note = Description of Artificial Sequence: Synthetic oligonucleotide
tggcttagaatactttcactt

SEQ ID NO: 30086 - RNA, 21 nt, synthetic construct
  source 1..21: mol_type = other RNA; note = Description of Artificial Sequence: Synthetic oligonucleotide
ttggcttagaatactttcatt

SEQ ID NO: 30087 - RNA, 21 nt, synthetic construct
  source 1..21: mol_type = other RNA; note = Description of Artificial Sequence: Synthetic oligonucleotide
tttggcttagaatactttctt

SEQ ID NO: 30088 - RNA, 21 nt, synthetic construct
  source 1..21: mol_type = other RNA; note = Description of Artificial Sequence: Synthetic oligonucleotide
tcttggcttagaatacttttt

SEQ ID NO: 30089 - RNA, 21 nt, synthetic construct
  source 1..21: mol_type = other RNA; note = Description of Artificial Sequence: Synthetic oligonucleotide
tacttggcttagaatactttt

SEQ ID NO: 30090 - RNA, 21 nt, synthetic construct
  source 1..21: mol_type = other RNA; note = Description of Artificial Sequence: Synthetic oligonucleotide
taacttggcttagaatacttt

SEQ ID NO: 30091 - RNA, 21 nt, synthetic construct
  source 1..21: mol_type = other RNA; note = Description of Artificial Sequence: Synthetic oligonucleotide
taaacttggcttagaatactt

SEQ ID NO: 30092 - RNA, 21 nt, synthetic construct
  source 1..21: mol_type = other RNA; note = Description of Artificial Sequence: Synthetic oligonucleotide
taaaacttggcttagaatatt

SEQ ID NO: 30093 - RNA, 21 nt, synthetic construct
  source 1..21: mol_type = other RNA; note = Description of Artificial Sequence: Synthetic oligonucleotide
ttaaaacttggcttagaattt

SEQ ID NO: 30094 - RNA, 21 nt, synthetic construct
  source 1..21: mol_type = other RNA; note = Description of Artificial Sequence: Synthetic oligonucleotide
tttaaaacttggcttagaatt

SEQ ID NO: 30095 - RNA, 21 nt, synthetic construct
  source 1..21: mol_type = other RNA; note = Description of Artificial Sequence: Synthetic oligonucleotide
ttttaaaacttggcttagatt

SEQ ID NO: 30096 - RNA, 21 nt, synthetic construct
  source 1..21: mol_type = other RNA; note = Description of Artificial Sequence: Synthetic oligonucleotide
tatttaaaacttggcttagtt

SEQ ID NO: 30097 - RNA, 21 nt, synthetic construct
  source 1..21: mol_type = other RNA; note = Description of Artificial Sequence: Synthetic oligonucleotide
ttatttaaaacttggcttatt

SEQ ID NO: 30098 - RNA, 21 nt, synthetic construct
  source 1..21: mol_type = other RNA; note = Description of Artificial Sequence: Synthetic oligonucleotide
tatatttaaaacttggctttt

SEQ ID NO: 30099 - RNA, 21 nt, synthetic construct
  source 1..21: mol_type = other RNA; note = Description of Artificial Sequence: Synthetic oligonucleotide
taatatttaaaacttggcttt

SEQ ID NO: 30100 - RNA, 21 nt, synthetic construct
  source 1..21: mol_type = other RNA; note = Description of Artificial Sequence: Synthetic oligonucleotide
ttaatatttaaaacttggctt

SEQ ID NO: 30101 - RNA, 21 nt, synthetic construct
  source 1..21: mol_type = other RNA; note = Description of Artificial Sequence: Synthetic oligonucleotide
tataatatttaaaacttggtt

SEQ ID NO: 30102 - RNA, 21 nt, synthetic construct
  source 1..21: mol_type = other RNA; note = Description of Artificial Sequence: Synthetic oligonucleotide
tgataatatttaaaacttgtt

SEQ ID NO: 30103 - RNA, 21 nt, synthetic construct
  source 1..21: mol_type = other RNA; note = Description of Artificial Sequence: Synthetic oligonucleotide
tagataatatttaaaactttt

SEQ ID NO: 30104 - RNA, 21 nt, synthetic construct
  source 1..21: mol_type = other RNA; note = Description of Artificial Sequence: Synthetic oligonucleotide
ttagataatatttaaaacttt

SEQ ID NO: 30105 - RNA, 21 nt, synthetic construct
  source 1..21: mol_type = other RNA; note = Description of Artificial Sequence: Synthetic oligonucleotide
tttagataatatttaaaactt

SEQ ID NO: 30106 - RNA, 21 nt, synthetic construct
  source 1..21: mol_type = other RNA; note = Description of Artificial Sequence: Synthetic oligonucleotide
tgttagataatatttaaaatt

SEQ ID NO: 30107 - RNA, 21 nt, synthetic construct
  source 1..21: mol_type = other RNA; note = Description of Artificial Sequence: Synthetic oligonucleotide
ttgttagataatatttaaatt

SEQ ID NO: 30108 - RNA, 21 nt, synthetic construct
  source 1..21: mol_type = other RNA; note = Description of Artificial Sequence: Synthetic oligonucleotide
tctgttagataatatttaatt

SEQ ID NO: 30109 - RNA, 21 nt, synthetic construct
  source 1..21: mol_type = other RNA; note = Description of Artificial Sequence: Synthetic oligonucleotide
ttctgttagataatatttatt

SEQ ID NO: 30110 - RNA, 21 nt, synthetic construct
  source 1..21: mol_type = other RNA; note = Description of Artificial Sequence: Synthetic oligonucleotide
tgtctgttagataatattttt

SEQ ID NO: 30111 - RNA, 21 nt, synthetic construct
  source 1..21: mol_type = other RNA; note = Description of Artificial Sequence: Synthetic oligonucleotide
ttgtctgttagataatatttt

SEQ ID NO: 30112 - RNA, 21 nt, synthetic construct
  source 1..21: mol_type = other RNA; note = Description of Artificial Sequence: Synthetic oligonucleotide
tttgtctgttagataatattt

SEQ ID NO: 30113 - RNA, 21 nt, synthetic construct
  source 1..21: mol_type = other RNA; note = Description of Artificial Sequence: Synthetic oligonucleotide
tcttgtctgttagataatatt

SEQ ID NO: 30114 - RNA, 21 nt, synthetic construct
  source 1..21: mol_type = other RNA; note = Description of Artificial Sequence: Synthetic oligonucleotide
ttcttgtctgttagataattt

SEQ ID NO: 30115 - RNA, 21 nt, synthetic construct
  source 1..21: mol_type = other RNA; note = Description of Artificial Sequence: Synthetic oligonucleotide
tctcttgtctgttagataatt

SEQ ID NO: 30116 - RNA, 21 nt, synthetic construct
  source 1..21: mol_type = other RNA; note = Description of Artificial Sequence: Synthetic oligonucleotide
tactcttgtctgttagatatt

SEQ ID NO: 30117 - RNA, 21 nt, synthetic construct
  source 1..21: mol_type = other RNA; note = Description of Artificial Sequence: Synthetic oligonucleotide
tcactcttgtctgttagattt

SEQ ID NO: 30118 - RNA, 21 nt, synthetic construct
  source 1..21: mol_type = other RNA; note = Description of Artificial Sequence: Synthetic oligonucleotide
tccactcttgtctgttagatt

SEQ ID NO: 30119 - RNA, 21 nt, synthetic construct
  source 1..21: mol_type = other RNA; note = Description of Artificial Sequence: Synthetic oligonucleotide
taccactcttgtctgttagtt

SEQ ID NO: 30120 - RNA, 21 nt, synthetic construct
  source 1..21: mol_type = other RNA; note = Description of Artificial Sequence: Synthetic oligonucleotide
ttaccactcttgtctgttatt

SEQ ID NO: 30121 - RNA, 21 nt, synthetic construct
  source 1..21: mol_type = other RNA; note = Description of Artificial Sequence: Synthetic oligonucleotide
tataccactcttgtctgtttt

SEQ ID NO: 30122 - RNA, 21 nt, synthetic construct
  source 1..21: mol_type = other RNA; note = Description of Artificial Sequence: Synthetic oligonucleotide
ttataccactcttgtctgttt

SEQ ID NO: 30123 - RNA, 21 nt, synthetic construct
  source 1..21: mol_type = other RNA; note = Description of Artificial Sequence: Synthetic oligonucleotide
tatataccactcttgtctgtt

SEQ ID NO: 30124 - RNA, 21 nt, synthetic construct
  source 1..21: mol_type = other RNA; note = Description of Artificial Sequence: Synthetic oligonucleotide
ttatataccactcttgtcttt

SEQ ID NO: 30125 - RNA, 21 nt, synthetic construct
  source 1..21: mol_type = other RNA; note = Description of Artificial Sequence: Synthetic oligonucleotide
tgtatataccactcttgtctt

SEQ ID NO: 30126 - RNA, 21 nt, synthetic construct
  source 1..21: mol_type = other RNA; note = Description of Artificial Sequence: Synthetic oligonucleotide
ttgtatataccactcttgttt

SEQ ID NO: 30127 - RNA, 21 nt, synthetic construct
  source 1..21: mol_type = other RNA; note = Description of Artificial Sequence: Synthetic oligonucleotide
tttgtatataccactcttgtt

SEQ ID NO: 30128 - RNA, 21 nt, synthetic construct
  source 1..21: mol_type = other RNA; note = Description of Artificial Sequence: Synthetic oligonucleotide
tcttgtatataccactctttt

SEQ ID NO: 30129 - RNA, 21 nt, synthetic construct
  source 1..21: mol_type = other RNA; note = Description of Artificial Sequence: Synthetic oligonucleotide
tacttgtatataccactcttt

SEQ ID NO: 30130 - RNA, 21 nt, synthetic construct
  source 1..21: mol_type = other RNA; note = Description of Artificial Sequence: Synthetic oligonucleotide
ttacttgtatataccactctt

SEQ ID NO: 30131 - RNA, 21 nt, synthetic construct
  source 1..21: mol_type = other RNA; note = Description of Artificial Sequence: Synthetic oligonucleotide
tctacttgtatataccacttt

SEQ ID NO: 30132 - RNA, 21 nt, synthetic construct
  source 1..21: mol_type = other RNA; note = Description of Artificial Sequence: Synthetic oligonucleotide
ttctacttgtatataccactt

SEQ ID NO: 30133 - RNA, 21 nt, synthetic construct
  source 1..21: mol_type = other RNA; note = Description of Artificial Sequence: Synthetic oligonucleotide
tatctacttgtatataccatt

SEQ ID NO: 30134 - RNA, 21 nt, synthetic construct
  source 1..21: mol_type = other RNA; note = Description of Artificial Sequence: Synthetic oligonucleotide
tgatctacttgtatatacctt

SEQ ID NO: 30135 - RNA, 21 nt, synthetic construct
  source 1..21: mol_type = other RNA; note = Description of Artificial Sequence: Synthetic oligonucleotide
tggatctacttgtatatactt

SEQ ID NO: 30136 - RNA, 21 nt, synthetic construct
  source 1..21: mol_type = other RNA; note = Description of Artificial Sequence: Synthetic oligonucleotide
taggatctacttgtatatatt

SEQ ID NO: 30137 - RNA, 21 nt, synthetic construct
  source 1..21: mol_type = other RNA; note = Description of Artificial Sequence: Synthetic oligonucleotide
tcaggatctacttgtatattt

SEQ ID NO: 30138 - RNA, 21 nt, synthetic construct
  source 1..21: mol_type = other RNA; note = Description of Artificial Sequence: Synthetic oligonucleotide
ttcaggatctacttgtatatt

SEQ ID NO: 30139 - RNA, 21 nt, synthetic construct
  source 1..21: mol_type = other RNA; note = Description of Artificial Sequence: Synthetic oligonucleotide
tctcaggatctacttgtattt

SEQ ID NO: 30140 - RNA, 21 nt, synthetic construct
  source 1..21: mol_type = other RNA; note = Description of Artificial Sequence: Synthetic oligonucleotide
ttctcaggatctacttgtatt

SEQ ID NO: 30141 - RNA, 21 nt, synthetic construct
  source 1..21: mol_type = other RNA; note = Description of Artificial Sequence: Synthetic oligonucleotide
tttctcaggatctacttgttt

SEQ ID NO: 30142 - RNA, 21 nt, synthetic construct
  source 1..21: mol_type = other RNA; note = Description of Artificial Sequence: Synthetic oligonucleotide
tcttctcaggatctacttgtt

SEQ ID NO: 30143 - RNA, 21 nt, synthetic construct
  source 1..21: mol_type = other RNA; note = Description of Artificial Sequence: Synthetic oligonucleotide
tacttctcaggatctactttt

SEQ ID NO: 30144 - RNA, 21 nt, synthetic construct
  source 1..21: mol_type = other RNA; note = Description of Artificial Sequence: Synthetic oligonucleotide
ttacttctcaggatctacttt

SEQ ID NO: 30145 - RNA, 21 nt, synthetic construct
  source 1..21: mol_type = other RNA; note = Description of Artificial Sequence: Synthetic oligonucleotide
tgtacttctcaggatctactt

SEQ ID NO: 30146 - RNA, 21 nt, synthetic construct
  source 1..21: mol_type = other RNA; note = Description of Artificial Sequence: Synthetic oligonucleotide
tggtacttctcaggatctatt

SEQ ID NO: 30147 - RNA, 21 nt, synthetic construct
  source 1..21: mol_type = other RNA; note = Description of Artificial Sequence: Synthetic oligonucleotide
taggtacttctcaggatcttt

SEQ ID NO: 30148 - RNA, 21 nt, synthetic construct
  source 1..21: mol_type = other RNA; note = Description of Artificial Sequence: Synthetic oligonucleotide
taaggtacttctcaggatctt

SEQ ID NO: 30149 - RNA, 21 nt, synthetic construct
  source 1..21: mol_type = other RNA; note = Description of Artificial Sequence: Synthetic oligonucleotide
taaaggtacttctcaggattt

SEQ ID NO: 30150 - RNA, 21 nt, synthetic construct
  source 1..21: mol_type = other RNA; note = Description of Artificial Sequence: Synthetic oligonucleotide
tcaaaggtacttctcaggatt

SEQ ID NO: 30151 - RNA, 21 nt, synthetic construct
  source 1..21: mol_type = other RNA; note = Description of Artificial Sequence: Synthetic oligonucleotide
tacaaaggtacttctcaggtt

SEQ ID NO: 30152 - RNA, 21 nt, synthetic construct
  source 1..21: mol_type = other RNA; note = Description of Artificial Sequence: Synthetic oligonucleotide
taacaaaggtacttctcagtt

SEQ ID NO: 30153 - RNA, 21 nt, synthetic construct
  source 1..21: mol_type = other RNA; note = Description of Artificial Sequence: Synthetic oligonucleotide
ttaacaaaggtacttctcatt

SEQ ID NO: 30154 - RNA, 21 nt, synthetic construct
  source 1..21: mol_type = other RNA; note = Description of Artificial Sequence: Synthetic oligonucleotide
tgtaacaaaggtacttctctt

SEQ ID NO: 30155 - RNA, 21 nt, synthetic construct
  source 1..21: mol_type = other RNA; note = Description of Artificial Sequence: Synthetic oligonucleotide
ttgtaacaaaggtacttcttt

SEQ ID NO: 30156 - RNA, 21 nt, synthetic construct
  source 1..21: mol_type = other RNA; note = Description of Artificial Sequence: Synthetic oligonucleotide
tctgtaacaaaggtacttctt

SEQ ID NO: 30157 - RNA, 21 nt, synthetic construct
  source 1..21: mol_type = other RNA; note = Description of Artificial Sequence: Synthetic oligonucleotide
tgctgtaacaaaggtactttt

SEQ ID NO: 30158 - RNA, 21 nt, synthetic construct
  source 1..21: mol_type = other RNA; note = Description of Artificial Sequence: Synthetic oligonucleotide
tagctgtaacaaaggtacttt

SEQ ID NO: 30159 - RNA, 21 nt, synthetic construct
  source 1..21: mol_type = other RNA; note = Description of Artificial Sequence: Synthetic oligonucleotide
ttagctgtaacaaaggtactt

SEQ ID NO: 30160 - RNA, 21 nt, synthetic construct
  source 1..21: mol_type = other RNA; note = Description of Artificial Sequence: Synthetic oligonucleotide
tgtagctgtaacaaaggtatt

SEQ ID NO: 30161 - RNA, 21 nt, synthetic construct
  source 1..21: mol_type = other RNA; note = Description of Artificial Sequence: Synthetic oligonucleotide
tagtagctgtaacaaaggttt

SEQ ID NO: 30162 - RNA, 21 nt, synthetic construct
  source 1..21: mol_type = other RNA; note = Description of Artificial Sequence: Synthetic oligonucleotide
ttagtagctgtaacaaaggtt

SEQ ID NO: 30163 - RNA, 21 nt, synthetic construct
  source 1..21: mol_type = other RNA; note = Description of Artificial Sequence: Synthetic oligonucleotide
tatagtagctgtaacaaagtt

SEQ ID NO: 30164 - RNA, 21 nt, synthetic construct
  source 1..21: mol_type = other RNA; note = Description of Artificial Sequence: Synthetic oligonucleotide
ttatagtagctgtaacaaatt

SEQ ID NO: 30165 - RNA, 21 nt, synthetic construct
  source 1..21: mol_type = other RNA; note = Description of Artificial Sequence: Synthetic oligonucleotide
tttatagtagctgtaacaatt

SEQ ID NO: 30166 - RNA, 21 nt, synthetic construct
  source 1..21: mol_type = other RNA; note = Description of Artificial Sequence: Synthetic oligonucleotide
ttttatagtagctgtaacatt

SEQ ID NO: 30167 - RNA, 21 nt, synthetic construct
  source 1..21: mol_type = other RNA; note = Description of Artificial Sequence: Synthetic oligonucleotide
tatttatagtagctgtaactt

SEQ ID NO: 30168 - RNA, 21 nt, synthetic construct
  source 1..21: mol_type = other RNA; note = Description of Artificial Sequence: Synthetic oligonucleotide
ttatttatagtagctgtaatt

SEQ ID NO: 30169 - RNA, 21 nt, synthetic construct
  source 1..21: mol_type = other RNA; note = Description of Artificial Sequence: Synthetic oligonucleotide
tatatttatagtagctgtatt

SEQ ID NO: 30170 - RNA, 21 nt, synthetic construct
  source 1..21: mol_type = other RNA; note = Description of Artificial Sequence: Synthetic oligonucleotide
ttatatttatagtagctgttt

SEQ ID NO: 30171 - RNA, 21 nt, synthetic construct
  source 1..21: mol_type = other RNA; note = Description of Artificial Sequence: Synthetic oligonucleotide
tgtatatttatagtagctgtt

SEQ ID NO: 30172 - RNA, 21 nt, synthetic construct
  source 1..21: mol_type = other RNA; note = Description of Artificial Sequence: Synthetic oligonucleotide
ttgtatatttatagtagcttt

SEQ ID NO: 30173 - RNA, 21 nt, synthetic construct
  source 1..21: mol_type = other RNA; note = Description of Artificial Sequence: Synthetic oligonucleotide
tatgtatatttatagtagctt

SEQ ID NO: 30174 - RNA, 21 nt, synthetic construct
  source 1..21: mol_type = other RNA; note = Description of Artificial Sequence: Synthetic oligonucleotide
ttatgtatatttatagtagtt

SEQ ID NO: 30175 - RNA, 21 nt, synthetic construct
  source 1..21: mol_type = other RNA; note = Description of Artificial Sequence: Synthetic oligonucleotide
tatatgtatatttatagtatt

SEQ ID NO: 30176 - RNA, 21 nt, synthetic construct
  source 1..21: mol_type = other RNA; note = Description of Artificial Sequence: Synthetic oligonucleotide
ttatatgtatatttatagttt

SEQ ID NO: 30177 - RNA, 21 nt, synthetic construct
  source 1..21: mol_type = other RNA; note = Description of Artificial Sequence: Synthetic oligonucleotide
tttatatgtatatttatagtt

SEQ ID NO: 30178 - RNA, 21 nt, synthetic construct
  source 1..21: mol_type = other RNA; note = Description of Artificial Sequence: Synthetic oligonucleotide
ttttatatgtatatttatatt

SEQ ID NO: 30179 - RNA, 21 nt, synthetic construct
  source 1..21: mol_type = other RNA; note = Description of Artificial Sequence: Synthetic oligonucleotide
tatttatatgtatatttattt

SEQ ID NO: 30180 - RNA, 21 nt, synthetic construct
  source 1..21: mol_type = other RNA; note = Description of Artificial Sequence: Synthetic oligonucleotide
taatttatatgtatatttatt

SEQ ID NO: 30181 - RNA, 21 nt, synthetic construct
  source 1..21: mol_type = other RNA; note = Description of Artificial Sequence: Synthetic oligonucleotide
ttaatttatatgtatattttt

SEQ ID NO: 30182 - RNA, 21 nt, synthetic construct
  source 1..21: mol_type = other RNA; note = Description of Artificial Sequence: Synthetic oligonucleotide
tataatttatatgtatatttt

SEQ ID NO: 30183 - RNA, 21 nt, synthetic construct
  source 1..21: mol_type = other RNA; note = Description of Artificial Sequence: Synthetic oligonucleotide
ttataatttatatgtatattt

SEQ ID NO: 30184 - RNA, 21 nt, synthetic construct
  source 1..21: mol_type = other RNA; note = Description of Artificial Sequence: Synthetic oligonucleotide
tctataatttatatgtatatt

SEQ ID NO: 30185 - RNA, 21 nt, synthetic construct
  source 1..21: mol_type = other RNA; note = Description of Artificial Sequence: Synthetic oligonucleotide
ttctataatttatatgtattt

SEQ ID NO: 30186 - RNA, 21 nt, synthetic construct
  source 1..21: mol_type = other RNA; note = Description of Artificial Sequence: Synthetic oligonucleotide
tttctataatttatatgtatt

SEQ ID NO: 30187 - RNA, 21 nt, synthetic construct
  source 1..21: mol_type = other RNA; note = Description of Artificial Sequence: Synthetic oligonucleotide
tattctataatttatatgttt

SEQ ID NO: 30188 - RNA, 21 nt, synthetic construct
  source 1..21: mol_type = other RNA; note = Description of Artificial Sequence: Synthetic oligonucleotide
tgattctataatttatatgtt

SEQ ID NO: 30189 - RNA, 21 nt, synthetic construct
  source 1..21: mol_type = other RNA; note = Description of Artificial Sequence: Synthetic oligonucleotide
tagattctataatttatattt

SEQ ID NO: 30190 - RNA, 21 nt, synthetic construct
  source 1..21: mol_type = other RNA; note = Description of Artificial Sequence: Synthetic oligonucleotide
ttagattctataatttatatt

SEQ ID NO: 30191 - RNA, 21 nt, synthetic construct
  source 1..21: mol_type = other RNA; note = Description of Artificial Sequence: Synthetic oligonucleotide
tgtagattctataatttattt

SEQ ID NO: 30192 - RNA, 21 nt, synthetic construct
  source 1..21: mol_type = other RNA; note = Description of Artificial Sequence: Synthetic oligonucleotide
tagtagattctataatttatt

SEQ ID NO: 30193 - RNA, 21 nt, synthetic construct
  source 1..21: mol_type = other RNA; note = Description of Artificial Sequence: Synthetic oligonucleotide
taagtagattctataattttt

SEQ ID NO: 30194 - RNA, 21 nt, synthetic construct
  source 1..21: mol_type = other RNA; note = Description of Artificial Sequence: Synthetic oligonucleotide
taaagtagattctataatttt

SEQ ID NO: 30195 - RNA, 21 nt, synthetic construct
  source 1..21: mol_type = other RNA; note = Description of Artificial Sequence: Synthetic oligonucleotide
ttaaagtagattctataattt

SEQ ID NO: 30196 - RNA, 21 nt, synthetic construct
  source 1..21: mol_type = other RNA; note = Description of Artificial Sequence: Synthetic oligonucleotide
tttaaagtagattctataatt

SEQ ID NO: 30197 - RNA, 21 nt, synthetic construct
  source 1..21: mol_type = other RNA; note = Description of Artificial Sequence: Synthetic oligonucleotide
tattaaagtagattctatatt

SEQ ID NO: 30198 - RNA, 21 nt, synthetic construct
  source 1..21: mol_type = other RNA; note = Description of Artificial Sequence: Synthetic oligonucleotide
taattaaagtagattctattt

SEQ ID NO: 30199 - RNA, 21 nt, synthetic construct
  source 1..21: mol_type = other RNA; note = Description of Artificial Sequence: Synthetic oligonucleotide
taaattaaagtagattctatt

SEQ ID NO: 30200 - RNA, 21 nt, synthetic construct
  source 1..21: mol_type = other RNA; note = Description of Artificial Sequence: Synthetic oligonucleotide
ttaaattaaagtagattcttt

SEQ ID NO: 30201 - RNA, 21 nt, synthetic construct
  source 1..21: mol_type = other RNA; note = Description of Artificial Sequence: Synthetic oligonucleotide
tataaattaaagtagattctt

SEQ ID NO: 30202 - RNA, 21 nt, synthetic construct
  source 1..21: mol_type = other RNA; note = Description of Artificial Sequence: Synthetic oligonucleotide
taataaattaaagtagatttt

SEQ ID NO: 30203 - RNA, 21 nt, synthetic construct
  source 1..21: mol_type = other RNA; note = Description of Artificial Sequence: Synthetic oligonucleotide
taaataaattaaagtagattt

SEQ ID NO: 30204 - RNA, 21 nt, synthetic construct
  source 1..21: mol_type = other RNA; note = Description of Artificial Sequence: Synthetic oligonucleotide
taaaataaattaaagtagatt

SEQ ID NO: 30205 - RNA, 21 nt, synthetic construct
  source 1..21: mol_type = other RNA; note = Description of Artificial Sequence: Synthetic oligonucleotide
tcaaaataaattaaagtagtt

SEQ ID NO: 30206 - RNA, 21 nt, synthetic construct
  source 1..21: mol_type = other RNA; note = Description of Artificial Sequence: Synthetic oligonucleotide
tacaaaataaattaaagtatt

SEQ ID NO: 30207 - RNA, 21 nt, synthetic construct
  source 1..21: mol_type = other RNA; note = Description of Artificial Sequence: Synthetic oligonucleotide
tcacaaaataaattaaagttt

SEQ ID NO: 30208 - RNA, 21 nt, synthetic construct
  source 1..21: mol_type = other RNA; note = Description of Artificial Sequence: Synthetic oligonucleotide
ttcacaaaataaattaaagtt

SEQ ID NO: 30209 - RNA, 21 nt, synthetic construct
  source 1..21: mol_type = other RNA; note = Description of Artificial Sequence: Synthetic oligonucleotide
tttcacaaaataaattaaatt

SEQ ID NO: 30210 - RNA, 21 nt, synthetic construct
  source 1..21: mol_type = other RNA; note = Description of Artificial Sequence: Synthetic oligonucleotide
tgttcacaaaataaattaatt

SEQ ID NO: 30211 - RNA, 21 nt, synthetic construct
  source 1..21: mol_type = other RNA; note = Description of Artificial Sequence: Synthetic oligonucleotide
ttgttcacaaaataaattatt

SEQ ID NO: 30212 - RNA, 21 nt, synthetic construct
  source 1..21: mol_type = other RNA; note = Description of Artificial Sequence: Synthetic oligonucleotide
tgtgttcacaaaataaatttt

SEQ ID NO: 30213 - RNA, 21 nt, synthetic construct
  source 1..21: mol_type = other RNA; note = Description of Artificial Sequence: Synthetic oligonucleotide
tagtgttcacaaaataaattt

SEQ ID NO: 30214 - RNA, 21 nt, synthetic construct
  source 1..21: mol_type = other RNA; note = Description of Artificial Sequence: Synthetic oligonucleotide
taagtgttcacaaaataaatt

SEQ ID NO: 30215 - RNA, 21 nt, synthetic construct
  source 1..21: mol_type = other RNA; note = Description of Artificial Sequence: Synthetic oligonucleotide
taaagtgttcacaaaataatt

SEQ ID NO: 30216 - RNA, 21 nt, synthetic construct
  source 1..21: mol_type = other RNA; note = Description of Artificial Sequence: Synthetic oligonucleotide
taaaagtgttcacaaaatatt

SEQ ID NO: 30217 - RNA, 21 nt, synthetic construct
  source 1..21: mol_type = other RNA; note = Description of Artificial Sequence: Synthetic oligonucleotide
tcaaaagtgttcacaaaattt

SEQ ID NO: 30218 - RNA, 21 nt, synthetic construct
  source 1..21: mol_type = other RNA; note = Description of Artificial Sequence: Synthetic oligonucleotide
ttcaaaagtgttcacaaaatt

SEQ ID NO: 30219 - RNA, 21 nt, synthetic construct
  source 1..21: mol_type = other RNA; note = Description of Artificial Sequence: Synthetic oligonucleotide
tttcaaaagtgttcacaaatt

SEQ ID NO: 30220 - RNA, 21 nt, synthetic construct
  source 1..21: mol_type = other RNA; note = Description of Artificial Sequence: Synthetic oligonucleotide
ttttcaaaagtgttcacaatt

SEQ ID NO: 30221 - RNA, 21 nt, synthetic construct
  source 1..21: mol_type = other RNA; note = Description of Artificial Sequence: Synthetic oligonucleotide
tttttcaaaagtgttcacatt

SEQ ID NO: 30222 - RNA, 21 nt, synthetic construct
  source 1..21: mol_type = other RNA; note = Description of Artificial Sequence: Synthetic oligonucleotide
tattttcaaaagtgttcactt

SEQ ID NO: 30223 - RNA, 21 nt, synthetic construct
  source 1..21: mol_type = other RNA; note = Description of Artificial Sequence: Synthetic oligonucleotide
tcattttcaaaagtgttcatt

SEQ ID NO: 30224 - RNA, 21 nt, synthetic construct
  source 1..21: mol_type = other RNA; note = Description of Artificial Sequence: Synthetic oligonucleotide
tacattttcaaaagtgttctt

SEQ ID NO: 30225 - RNA, 21 nt, synthetic construct
  source 1..21: mol_type = other RNA; note = Description of Artificial Sequence: Synthetic oligonucleotide
ttacattttcaaaagtgtttt

SEQ ID NO: 30226 - RNA, 21 nt, synthetic construct
  source 1..21: mol_type = other RNA; note = Description of Artificial Sequence: Synthetic oligonucleotide
tgtacattttcaaaagtgttt

SEQ ID NO: 30227 - RNA, 21 nt, synthetic construct
  source 1..21: mol_type = other RNA; note = Description of Artificial Sequence: Synthetic oligonucleotide
ttgtacattttcaaaagtgtt

SEQ ID NO: 30228 - RNA, 21 nt, synthetic construct
  source 1..21: mol_type = other RNA; note = Description of Artificial Sequence: Synthetic oligonucleotide
tatgtacattttcaaaagttt

SEQ ID NO: 30229 - RNA, 21 nt, synthetic construct
  source 1..21: mol_type = other RNA; note = Description of Artificial Sequence: Synthetic oligonucleotide
tcatgtacattttcaaaagtt

SEQ ID NO: 30230 - RNA, 21 nt, synthetic construct
  source 1..21: mol_type = other RNA; note = Description of Artificial Sequence: Synthetic oligonucleotide
tacatgtacattttcaaaatt

SEQ ID NO: 30231 - RNA, 21 nt, synthetic construct
  source 1..21: mol_type = other RNA; note = Description of Artificial Sequence: Synthetic oligonucleotide
taacatgtacattttcaaatt

SEQ ID NO: 30232 - RNA, 21 nt, synthetic construct
  source 1..21: mol_type = other RNA; note = Description of Artificial Sequence: Synthetic oligonucleotide
tgaacatgtacattttcaatt

SEQ ID NO: 30233 - RNA, 21 nt, synthetic construct
  source 1..21: mol_type = other RNA; note = Description of Artificial Sequence: Synthetic oligonucleotide
tggaacatgtacattttcatt

SEQ ID NO: 30234 - RNA, 21 nt, synthetic construct
  source 1..21: mol_type = other RNA; note = Description of Artificial Sequence: Synthetic oligonucleotide
taggaacatgtacattttctt

SEQ ID NO: 30235 - RNA, 21 nt, synthetic construct
  source 1..21: mol_type = other RNA; note = Description of Artificial Sequence: Synthetic oligonucleotide
taaggaacatgtacatttttt

SEQ ID NO: 30236 - RNA, 21 nt, synthetic construct
  source 1..21: mol_type = other RNA; note = Description of Artificial Sequence: Synthetic oligonucleotide
taaaggaacatgtacattttt

SEQ ID NO: 30237 - RNA, 21 nt, synthetic construct
  source 1..21: mol_type = other RNA; note = Description of Artificial Sequence: Synthetic oligonucleotide
tcaaaggaacatgtacatttt

SEQ ID NO: 30238 - RNA, 21 nt, synthetic construct
  source 1..21: mol_type = other RNA; note = Description of Artificial Sequence: Synthetic oligonucleotide
tacaaaggaacatgtacattt

SEQ ID NO: 30239 - RNA, 21 nt, synthetic construct
  source 1..21: mol_type = other RNA; note = Description of Artificial Sequence: Synthetic oligonucleotide
ttacaaaggaacatgtacatt

SEQ ID NO: 30240 - RNA, 21 nt, synthetic construct
  source 1..21: mol_type = other RNA; note = Description of Artificial Sequence: Synthetic oligonucleotide
tttacaaaggaacatgtactt

SEQ ID NO: 30241 - RNA, 21 nt, synthetic construct
  source 1..21: mol_type = other RNA; note = Description of Artificial Sequence: Synthetic oligonucleotide
tattacaaaggaacatgtatt

SEQ ID NO: 30242 - RNA, 21 nt, synthetic construct
  source 1..21: mol_type = other RNA; note = Description of Artificial Sequence: Synthetic oligonucleotide
taattacaaaggaacatgttt

SEQ ID NO: 30243 - RNA, 21 nt, synthetic construct
  source 1..21: mol_type = other RNA; note = Description of Artificial Sequence: Synthetic oligonucleotide
tcaattacaaaggaacatgtt

SEQ ID NO: 30244 - RNA, 21 nt, synthetic construct
  source 1..21: mol_type = other RNA; note = Description of Artificial Sequence: Synthetic oligonucleotide
ttcaattacaaaggaacattt

SEQ ID NO: 30245 - RNA, 21 nt, synthetic construct
  source 1..21: mol_type = other RNA; note = Description of Artificial Sequence: Synthetic oligonucleotide
tgtcaattacaaaggaacatt

SEQ ID NO: 30246 - RNA, 21 nt, synthetic construct
  source 1..21: mol_type = other RNA; note = Description of Artificial Sequence: Synthetic oligonucleotide
ttgtcaattacaaaggaactt

SEQ ID NO: 30247 - RNA, 21 nt, synthetic construct
  source 1..21: mol_type = other RNA; note = Description of Artificial Sequence: Synthetic oligonucleotide
tgtgtcaattacaaaggaatt

SEQ ID NO: 30248 - RNA, 21 nt, synthetic construct
  source 1..21: mol_type = other RNA; note = Description of Artificial Sequence: Synthetic oligonucleotide
tagtgtcaattacaaaggatt

SEQ ID NO: 30249 - RNA, 21 nt, synthetic construct
  source 1..21: mol_type = other RNA; note = Description of Artificial Sequence: Synthetic oligonucleotide
ttagtgtcaattacaaaggtt

SEQ ID NO: 30250 - RNA, 21 nt, synthetic construct
  source 1..21: mol_type = other RNA; note = Description of Artificial Sequence: Synthetic oligonucleotide
tatagtgtcaattacaaagtt

SEQ ID NO: 30251 - RNA, 21 nt, synthetic construct
  source 1..21: mol_type = other RNA; note = Description of Artificial Sequence: Synthetic oligonucleotide
ttatagtgtcaattacaaatt

SEQ ID NO: 30252 - RNA, 21 nt, synthetic construct
  source 1..21: mol_type = other RNA; note = Description of Artificial Sequence: Synthetic oligonucleotide
tatatagtgtcaattacaatt

SEQ ID NO: 30253 - RNA, 21 nt, synthetic construct
  source 1..21: mol_type = other RNA; note = Description of Artificial Sequence: Synthetic oligonucleotide
ttatatagtgtcaattacatt

SEQ ID NO: 30254 - RNA, 21 nt, synthetic construct
  source 1..21: mol_type = other RNA; note = Description of Artificial Sequence: Synthetic oligonucleotide
tatatatagtgtcaattactt

SEQ ID NO: 30255 - RNA, 21 nt, synthetic construct
  source 1..21: mol_type = other RNA; note = Description of Artificial Sequence: Synthetic oligonucleotide
taatatatagtgtcaattatt

SEQ ID NO: 30256 - RNA, 21 nt, synthetic construct
  source 1..21: mol_type = other RNA; note = Description of Artificial Sequence: Synthetic oligonucleotide
taaatatatagtgtcaatttt

SEQ ID NO: 30257 - RNA, 21 nt, synthetic construct
  source 1..21: mol_type = other RNA; note = Description of Artificial Sequence: Synthetic oligonucleotide
tgaaatatatagtgtcaattt

SEQ ID NO: 30258 - RNA, 21 nt, synthetic construct
  source 1..21: mol_type = other RNA; note = Description of Artificial Sequence: Synthetic oligonucleotide
tagaaatatatagtgtcaatt

SEQ ID NO: 30259 - RNA, 21 nt, synthetic construct
  source 1..21: mol_type = other RNA; note = Description of Artificial Sequence: Synthetic oligonucleotide
taagaaatatatagtgtcatt

SEQ ID NO: 30260 - RNA, 21 nt, synthetic construct
  source 1..21: mol_type = other RNA; note = Description of Artificial Sequence: Synthetic oligonucleotide
ttaagaaatatatagtgtctt

SEQ ID NO: 30261 - RNA, 21 nt, synthetic construct
  source 1..21: mol_type = other RNA; note = Description of Artificial Sequence: Synthetic oligonucleotide
tttaagaaatatatagtgttt

SEQ ID NO: 30262 - RNA, 21 nt, synthetic construct
  source 1..21: mol_type = other RNA; note = Description of Artificial Sequence: Synthetic oligonucleotide
tattaagaaatatatagtgtt

SEQ ID NO: 30263 - RNA, 21 nt, synthetic construct
  source 1..21: mol_type = other RNA; note = Description of Artificial Sequence: Synthetic oligonucleotide
ttattaagaaatatatagttt

SEQ ID NO: 30264 - RNA, 21 nt, synthetic construct
  source 1..21: mol_type = other RNA; note = Description of Artificial Sequence: Synthetic oligonucleotide
tttattaagaaatatatagtt

SEQ ID NO: 30265 - RNA, 21 nt, synthetic construct
  source 1..21: mol_type = other RNA; note = Description of Artificial Sequence: Synthetic oligonucleotide
ttttattaagaaatatatatt

SEQ ID NO: 30266 - RNA, 21 nt, synthetic construct
  source 1..21: mol_type = other RNA; note = Description of Artificial Sequence: Synthetic oligonucleotide
tttttattaagaaatatattt

SEQ ID NO: 30267 - RNA, 21 nt, synthetic construct
  source 1..21: mol_type = other RNA; note = Description of Artificial Sequence: Synthetic oligonucleotide
tattttattaagaaatatatt

SEQ ID NO: 30268 - RNA, 21 nt, synthetic construct
  source 1..21: mol_type = other RNA; note = Description of Artificial Sequence: Synthetic oligonucleotide
ttattttattaagaaatattt

SEQ ID NO: 30269 - RNA, 21 nt, synthetic construct
  source 1..21: mol_type = other RNA; note = Description of Artificial Sequence: Synthetic oligonucleotide
tttattttattaagaaatatt

SEQ ID NO: 30270 - RNA, 21 nt, synthetic construct
  source 1..21: mol_type = other RNA; note = Description of Artificial Sequence: Synthetic oligonucleotide
tattattttattaagaaattt

SEQ ID NO: 30271 - RNA, 21 nt, synthetic construct
  source 1..21: mol_type = other RNA; note = Description of Artificial Sequence: Synthetic oligonucleotide
taattattttattaagaaatt

SEQ ID NO: 30272 - RNA, 21 nt, synthetic construct
  source 1..21: mol_type = other RNA; note = Description of Artificial Sequence: Synthetic oligonucleotide
tgaattattttattaagaatt

SEQ ID NO: 30273 - RNA, 21 nt, synthetic construct
  source 1..21: mol_type = other RNA; note = Description of Artificial Sequence: Synthetic oligonucleotide
tagaattattttattaagatt

SEQ ID NO: 30274 - RNA, 21 nt, synthetic construct
  source 1..21: mol_type = other RNA; note = Description of Artificial Sequence: Synthetic oligonucleotide
tgagaattattttattaagtt

SEQ ID NO: 30275 - RNA, 21 nt, synthetic construct
  source 1..21: mol_type = other RNA; note = Description of Artificial Sequence: Synthetic oligonucleotide
ttgagaattattttattaatt

SEQ ID NO: 30276 - RNA, 21 nt, synthetic construct
  source 1..21: mol_type = other RNA; note = Description of Artificial Sequence: Synthetic oligonucleotide
tttgagaattattttattatt

SEQ ID NO: 30277 - RNA, 21 nt, synthetic construct
  source 1..21: mol_type = other RNA; note = Description of Artificial Sequence: Synthetic oligonucleotide
ttttgagaattattttatttt

SEQ ID NO: 30278 - RNA, 21 nt, synthetic construct
  source 1..21: mol_type = other RNA; note = Description of Artificial Sequence: Synthetic oligonucleotide
tatttgagaattattttattt

SEQ ID NO: 30279 - RNA, 21 nt, synthetic construct
  source 1..21: mol_type = other RNA; note = Description of Artificial Sequence: Synthetic oligonucleotide
taatttgagaattattttatt

SEQ ID NO: 30280 - RNA, 21 nt, synthetic construct
  source 1..21: mol_type = other RNA; note = Description of Artificial Sequence: Synthetic oligonucleotide
taaatttgagaattatttttt

SEQ ID NO: 30281 - RNA, 21 nt, synthetic construct
  source 1..21: mol_type = other RNA; note = Description of Artificial Sequence: Synthetic oligonucleotide
tcaaatttgagaattattttt

SEQ ID NO: 30282 - RNA, 21 nt, synthetic construct
  source 1..21: mol_type = other RNA; note = Description of Artificial Sequence: Synthetic oligonucleotide
tacaaatttgagaattatttt

SEQ ID NO: 30283 - RNA, 21 nt, synthetic construct
  source 1..21: mol_type = other RNA; note = Description of Artificial Sequence: Synthetic oligonucleotide
taacaaatttgagaattattt

SEQ ID NO: 30284 - RNA, 21 nt, synthetic construct
  source 1..21: mol_type = other RNA; note = Description of Artificial Sequence: Synthetic oligonucleotide
taaacaaatttgagaattatt

SEQ ID NO: 30285 - RNA, 21 nt, synthetic construct
  source 1..21: mol_type = other RNA; note = Description of Artificial Sequence: Synthetic oligonucleotide
tgaaacaaatttgagaatttt

SEQ ID NO: 30286 - RNA, 21 nt, synthetic construct
  source 1..21: mol_type = other RNA; note = Description of Artificial Sequence: Synthetic oligonucleotide
tagaaacaaatttgagaattt

SEQ ID NO: 30287 - RNA, 21 nt, synthetic construct
  source 1..21: mol_type = other RNA; note = Description of Artificial Sequence: Synthetic oligonucleotide
taagaaacaaatttgagaatt

SEQ ID NO: 30288 - RNA, 21 nt, synthetic construct
  source 1..21: mol_type = other RNA; note = Description of Artificial Sequence: Synthetic oligonucleotide
ttaagaaacaaatttgagatt

SEQ ID NO: 30289 - RNA, 21 nt, synthetic construct
  source 1..21: mol_type = other RNA; note = Description of Artificial Sequence: Synthetic oligonucleotide
tataagaaacaaatttgagtt

SEQ ID NO: 30290 - RNA, 21 nt, synthetic construct
  source 1..21: mol_type = other RNA; note = Description of Artificial Sequence: Synthetic oligonucleotide
tcataagaaacaaatttgatt

SEQ ID NO: 30291 - RNA, 21 nt, synthetic construct
  source 1..21: mol_type = other RNA; note = Description of Artificial Sequence: Synthetic oligonucleotide
ttcataagaaacaaatttgtt

SEQ ID NO: 30292 - RNA, 21 nt, synthetic construct
  source 1..21: mol_type = other RNA; note = Description of Artificial Sequence: Synthetic oligonucleotide
tttcataagaaacaaattttt

SEQ ID NO: 30293 - RNA, 21 nt, synthetic construct
  source 1..21: mol_type = other RNA; note = Description of Artificial Sequence: Synthetic oligonucleotide
tattcataagaaacaaatttt

SEQ ID NO: 30294 - RNA, 21 nt, synthetic construct
  source 1..21: mol_type = other RNA; note = Description of Artificial Sequence: Synthetic oligonucleotide
tgattcataagaaacaaattt

SEQ ID NO: 30295 - RNA, 21 nt, synthetic construct
  source 1..21: mol_type = other RNA; note = Description of Artificial Sequence: Synthetic oligonucleotide
ttgattcataagaaacaaatt

SEQ ID NO: 30296 - RNA, 21 nt, synthetic construct
  source 1..21: mol_type = other RNA; note = Description of Artificial Sequence: Synthetic oligonucleotide
tatgattcataagaaacaatt

SEQ ID NO: 30297 - RNA, 21 nt, synthetic construct
  source 1..21: mol_type = other RNA; note = Description of Artificial Sequence: Synthetic oligonucleotide
tgatgattcataagaaacatt

SEQ ID NO: 30298 - RNA, 21 nt, synthetic construct
  source 1..21: mol_type = other RNA; note = Description of Artificial Sequence: Synthetic oligonucleotide
tagatgattcataagaaactt

SEQ ID NO: 30299 - RNA, 21 nt, synthetic construct
  source 1..21: mol_type = other RNA; note = Description of Artificial Sequence: Synthetic oligonucleotide
tgagatgattcataagaaatt

SEQ ID NO: 30300 - RNA, 21 nt, synthetic construct
  source 1..21: mol_type = other RNA; note = Description of Artificial Sequence: Synthetic oligonucleotide
tagagatgattcataagaatt

SEQ ID NO: 30301 - RNA, 21 nt, synthetic construct
  source 1..21: mol_type = other RNA; note = Description of Artificial Sequence: Synthetic oligonucleotide
tgagagatgattcataagatt

SEQ ID NO: 30302 - RNA, 21 nt, synthetic construct
  source 1..21: mol_type = other RNA; note = Description of Artificial Sequence: Synthetic oligonucleotide
ttgagagatgattcataagtt

SEQ ID NO: 30303 - RNA, 21 nt, synthetic construct
  source 1..21: mol_type = other RNA; note = Description of Artificial Sequence: Synthetic oligonucleotide
tttgagagatgattcataatt

SEQ ID NO: 30304 - RNA, 21 nt, synthetic construct
  source 1..21: mol_type = other RNA; note = Description of Artificial Sequence: Synthetic oligonucleotide
ttttgagagatgattcatatt

SEQ ID NO: 30305 - RNA, 21 nt, synthetic construct
  source 1..21: mol_type = other RNA; note = Description of Artificial Sequence: Synthetic oligonucleotide
tatttgagagatgattcattt

SEQ ID NO: 30306 - RNA, 21 nt, synthetic construct
  source 1..21: mol_type = other RNA; note = Description of Artificial Sequence: Synthetic oligonucleotide
tgatttgagagatgattcatt

SEQ ID NO: 30307 - RNA, 21 nt, synthetic construct
  source 1..21: mol_type = other RNA; note = Description of Artificial Sequence: Synthetic oligonucleotide
tagatttgagagatgattctt

SEQ ID NO: 30308 - RNA, 21 nt, synthetic construct
  source 1..21: mol_type = other RNA; note = Description of Artificial Sequence: Synthetic oligonucleotide
ttagatttgagagatgatttt

SEQ ID NO: 30309 - RNA, 21 nt, synthetic construct
  source 1..21: mol_type = other RNA; note = Description of Artificial Sequence: Synthetic oligonucleotide
tctagatttgagagatgattt

SEQ ID NO: 30310 - RNA, 21 nt, synthetic construct
  source 1..21: mol_type = other RNA; note = Description of Artificial Sequence: Synthetic oligonucleotide
tactagatttgagagatgatt

SEQ ID NO: 30311 - RNA, 21 nt, synthetic construct
  source 1..21: mol_type = other RNA; note = Description of Artificial Sequence: Synthetic oligonucleotide
taactagatttgagagatgtt

SEQ ID NO: 30312 - RNA, 21 nt, synthetic construct
  source 1..21: mol_type = other RNA; note = Description of Artificial Sequence: Synthetic oligonucleotide
ttaactagatttgagagattt

SEQ ID NO: 30313 - RNA, 21 nt, synthetic construct
  source 1..21: mol_type = other RNA; note = Description of Artificial Sequence: Synthetic oligonucleotide
tctaactagatttgagagatt

SEQ ID NO: 30314 - RNA, 21 nt, synthetic construct
  source 1..21: mol_type = other RNA; note = Description of Artificial Sequence: Synthetic oligonucleotide
ttctaactagatttgagagtt

SEQ ID NO: 30315 - RNA, 21 nt, synthetic construct
  source 1..21: mol_type = other RNA; note = Description of Artificial Sequence: Synthetic oligonucleotide
tgtctaactagatttgagatt

SEQ ID NO: 30316 - RNA, 21 nt, synthetic construct
  source 1..21: mol_type = other RNA; note = Description of Artificial Sequence: Synthetic oligonucleotide
ttgtctaactagatttgagtt

SEQ ID NO: 30317 - RNA, 21 nt, synthetic construct
  source 1..21: mol_type = other RNA; note = Description of Artificial Sequence: Synthetic oligonucleotide
tttgtctaactagatttgatt

SEQ ID NO: 30318 - RNA, 21 nt, synthetic construct
  source 1..21: mol_type = other RNA; note = Description of Artificial Sequence: Synthetic oligonucleotide
tattgtctaactagatttgtt

SEQ ID NO: 30319 - RNA, 21 nt, synthetic construct
  source 1..21: mol_type = other RNA; note = Description of Artificial Sequence: Synthetic oligonucleotide
taattgtctaactagattttt

SEQ ID NO: 30320 - RNA, 21 nt, synthetic construct
  source 1..21: mol_type = other RNA; note = Description of Artificial Sequence: Synthetic oligonucleotide
taaattgtctaactagatttt

SEQ ID NO: 30321 - RNA, 21 nt, synthetic construct
  source 1..21: mol_type = other RNA; note = Description of Artificial Sequence: Synthetic oligonucleotide
tcaaattgtctaactagattt

SEQ ID NO: 30322 - RNA, 21 nt, synthetic construct
  source 1..21: mol_type = other RNA; note = Description of Artificial Sequence: Synthetic oligonucleotide
tgcaaattgtctaactagatt

SEQ ID NO: 30323 - RNA, 21 nt, synthetic construct
  source 1..21: mol_type = other RNA; note = Description of Artificial Sequence: Synthetic oligonucleotide
ttgcaaattgtctaactagtt

SEQ ID NO: 30324 - RNA, 21 nt, synthetic construct
  source 1..21: mol_type = other RNA; note = Description of Artificial Sequence: Synthetic oligonucleotide
tgtgcaaattgtctaactatt

SEQ ID NO: 30325 - RNA, 21 nt, synthetic construct
  source 1..21: mol_type = other RNA; note = Description of Artificial Sequence: Synthetic oligonucleotide
ttgtgcaaattgtctaacttt

SEQ ID NO: 30326 - RNA, 21 nt, synthetic construct
  source 1..21: mol_type = other RNA; note = Description of Artificial Sequence: Synthetic oligonucleotide
tgtgtgcaaattgtctaactt

SEQ ID NO: 30327 - RNA, 21 nt, synthetic construct
  source 1..21: mol_type = other RNA; note = Description of Artificial Sequence: Synthetic oligonucleotide
ttgtgtgcaaattgtctaatt

SEQ ID NO: 30328 - RNA, 21 nt, synthetic construct
  source 1..21: mol_type = other RNA; note = Description of Artificial Sequence: Synthetic oligonucleotide
tatgtgtgcaaattgtctatt

SEQ ID NO: 30329 - RNA, 21 nt, synthetic construct
  source 1..21: mol_type = other RNA; note = Description of Artificial Sequence: Synthetic oligonucleotide
ttatgtgtgcaaattgtcttt

SEQ ID NO: 30330 - RNA, 21 nt, synthetic construct
  source 1..21: mol_type = other RNA; note = Description of Artificial Sequence: Synthetic oligonucleotide
tgtatgtgtgcaaattgtctt

SEQ ID NO: 30331 - RNA, 21 nt, synthetic construct
  source 1..21: mol_type = other RNA; note = Description of Artificial Sequence: Synthetic oligonucleotide
tagtatgtgtgcaaattgttt

SEQ ID NO: 30332 - RNA, 21 nt, synthetic construct
  source 1..21: mol_type = other RNA; note = Description of Artificial Sequence: Synthetic oligonucleotide
taagtatgtgtgcaaattgtt

SEQ ID NO: 30333 - RNA, 21 nt, synthetic construct
  source 1..21: mol_type = other RNA; note = Description of Artificial Sequence: Synthetic oligonucleotide
taaagtatgtgtgcaaatttt

SEQ ID NO: 30334 - RNA, 21 nt, synthetic construct
  source 1..21: mol_type = other RNA; note = Description of Artificial Sequence: Synthetic oligonucleotide
taaaagtatgtgtgcaaattt

SEQ ID NO: 30335 - RNA, 21 nt, synthetic construct
  source 1..21: mol_type = other RNA; note = Description of Artificial Sequence: Synthetic oligonucleotide
tgaaaagtatgtgtgcaaatt

SEQ ID NO: 30336 - RNA, 21 nt, synthetic construct
  source 1..21: mol_type = other RNA; note = Description of Artificial Sequence: Synthetic oligonucleotide
tagaaaagtatgtgtgcaatt

SEQ ID NO: 30337 - RNA, 21 nt, synthetic construct
  source 1..21: mol_type = other RNA; note = Description of Artificial Sequence: Synthetic oligonucleotide
ttagaaaagtatgtgtgcatt

SEQ ID NO: 30338 - RNA, 21 nt, synthetic construct
  source 1..21: mol_type = other RNA; note = Description of Artificial Sequence: Synthetic oligonucleotide
tttagaaaagtatgtgtgctt

SEQ ID NO: 30339 - RNA, 21 nt, synthetic construct
  source 1..21: mol_type = other RNA; note = Description of Artificial Sequence: Synthetic oligonucleotide
tcttagaaaagtatgtgtgtt

SEQ ID NO: 30340 - RNA, 21 nt, synthetic construct
  source 1..21: mol_type = other RNA; note = Description of Artificial Sequence: Synthetic oligonucleotide
tccttagaaaagtatgtgttt

SEQ ID NO: 30341 - RNA, 21 nt, synthetic construct
  source 1..21: mol_type = other RNA; note = Description of Artificial Sequence: Synthetic oligonucleotide
tcccttagaaaagtatgtgtt

SEQ ID NO: 30342 - RNA, 21 nt, synthetic construct
  source 1..21: mol_type = other RNA; note = Description of Artificial Sequence: Synthetic oligonucleotide
ttcccttagaaaagtatgttt

SEQ ID NO: 30343 - RNA, 21 nt, synthetic construct
  source 1..21: mol_type = other RNA; note = Description of Artificial Sequence: Synthetic oligonucleotide
tgtcccttagaaaagtatgtt

SEQ ID NO: 30344 - RNA, 21 nt, synthetic construct
  source 1..21: mol_type = other RNA; note = Description of Artificial Sequence: Synthetic oligonucleotide
ttgtcccttagaaaagtattt

SEQ ID NO: 30345 - RNA, 21 nt, synthetic construct
  source 1..21: mol_type = other RNA; note = Description of Artificial Sequence: Synthetic oligonucleotide
tatgtcccttagaaaagtatt

SEQ ID NO: 30346 - RNA, 21 nt, synthetic construct
  source 1..21: mol_type = other RNA; note = Description of Artificial Sequence: Synthetic oligonucleotide
taatgtcccttagaaaagttt

SEQ ID NO: 30347 - RNA, 21 nt, synthetic construct
  source 1..21: mol_type = other RNA; note = Description of Artificial Sequence: Synthetic oligonucleotide
ttaatgtcccttagaaaagtt

SEQ ID NO: 30348 - RNA, 21 nt, synthetic construct
  source 1..21: mol_type = other RNA; note = Description of Artificial Sequence: Synthetic oligonucleotide
tataatgtcccttagaaaatt

SEQ ID NO: 30349 - RNA, 21 nt, synthetic construct
  source 1..21: mol_type = other RNA; note = Description of Artificial Sequence: Synthetic oligonucleotide
tgataatgtcccttagaaatt

SEQ ID NO: 30350 - RNA, 21 nt, synthetic construct
  source 1..21: mol_type = other RNA; note = Description of Artificial Sequence: Synthetic oligonucleotide
tagataatgtcccttagaatt

SEQ ID NO: 30351 - RNA, 21 nt, synthetic construct
  source 1..21: mol_type = other RNA; note = Description of Artificial Sequence: Synthetic oligonucleotide
taagataatgtcccttagatt

SEQ ID NO: 30352 - RNA, 21 nt, synthetic construct
  source 1..21: mol_type = other RNA; note = Description of Artificial Sequence: Synthetic oligonucleotide
tgaagataatgtcccttagtt

SEQ ID NO: 30353 - RNA, 21 nt, synthetic construct
  source 1..21: mol_type = other RNA; note = Description of Artificial Sequence: Synthetic oligonucleotide
tggaagataatgtcccttatt

SEQ ID NO: 30354 - RNA, 21 nt, synthetic construct
  source 1..21: mol_type = other RNA; note = Description of Artificial Sequence: Synthetic oligonucleotide
taggaagataatgtccctttt

SEQ ID NO: 30355 - RNA, 21 nt, synthetic construct
  source 1..21: mol_type = other RNA; note = Description of Artificial Sequence: Synthetic oligonucleotide
taaggaagataatgtcccttt

SEQ ID NO: 30356 - RNA, 21 nt, synthetic construct
  source 1..21: mol_type = other RNA; note = Description of Artificial Sequence: Synthetic oligonucleotide
tgaaggaagataatgtccctt

SEQ ID NO: 30357 - RNA, 21 nt, synthetic construct
  source 1..21: mol_type = other RNA; note = Description of Artificial Sequence: Synthetic oligonucleotide
ttgaaggaagataatgtcctt

SEQ ID NO: 30358 - RNA, 21 nt, synthetic construct
  source 1..21: mol_type = other RNA; note = Description of Artificial Sequence: Synthetic oligonucleotide
tctgaaggaagataatgtctt

SEQ ID NO: 30359 - RNA, 21 nt, synthetic construct
  source 1..21: mol_type = other RNA; note = Description of Artificial Sequence: Synthetic oligonucleotide
tcctgaaggaagataatgttt

SEQ ID NO: 30360 - RNA, 21 nt, synthetic construct
  source 1..21: mol_type = other RNA; note = Description of Artificial Sequence: Synthetic oligonucleotide
tacctgaaggaagataatgtt

SEQ ID NO: 30361 - RNA, 21 nt, synthetic construct
  source 1..21: mol_type = other RNA; note = Description of Artificial Sequence: Synthetic oligonucleotide
taacctgaaggaagataattt

SEQ ID NO: 30362 - RNA, 21 nt, synthetic construct
  source 1..21: mol_type = other RNA; note = Description of Artificial Sequence: Synthetic oligonucleotide
taaacctgaaggaagataatt

SEQ ID NO: 30363 - RNA, 21 nt, synthetic construct
  source 1..21: mol_type = other RNA; note = Description of Artificial Sequence: Synthetic oligonucleotide
taaaacctgaaggaagatatt

SEQ ID NO: 30364 - RNA, 21 nt, synthetic construct
  source 1..21: mol_type = other RNA; note = Description of Artificial Sequence: Synthetic oligonucleotide
taaaaacctgaaggaagattt

SEQ ID NO: 30365 - RNA, 21 nt, synthetic construct
  source 1..21: mol_type = other RNA; note = Description of Artificial Sequence: Synthetic oligonucleotide
ttaaaaacctgaaggaagatt

SEQ ID NO: 30366 - RNA, 21 nt, synthetic construct
  source 1..21: mol_type = other RNA; note = Description of Artificial Sequence: Synthetic oligonucleotide
tgtaaaaacctgaaggaagtt

SEQ ID NO: 30367 - RNA, 21 nt, synthetic construct
  source 1..21: mol_type = other RNA; note = Description of Artificial Sequence: Synthetic oligonucleotide
tggtaaaaacctgaaggaatt

SEQ ID NO: 30368 - RNA, 21 nt, synthetic construct
  source 1..21: mol_type = other RNA; note = Description of Artificial Sequence: Synthetic oligonucleotide
taggtaaaaacctgaaggatt

SEQ ID NO: 30369 - RNA, 21 nt, synthetic construct
  source 1..21: mol_type = other RNA; note = Description of Artificial Sequence: Synthetic oligonucleotide
tgaggtaaaaacctgaaggtt

SEQ ID NO: 30370 - RNA, 21 nt, synthetic construct
  source 1..21: mol_type = other RNA; note = Description of Artificial Sequence: Synthetic oligonucleotide
tggaggtaaaaacctgaagtt

SEQ ID NO: 30371 - RNA, 21 nt, synthetic construct
  source 1..21: mol_type = other RNA; note = Description of Artificial Sequence: Synthetic oligonucleotide
ttggaggtaaaaacctgaatt

SEQ ID NO: 30372 - RNA, 21 nt, synthetic construct
  source 1..21: mol_type = other RNA; note = Description of Artificial Sequence: Synthetic oligonucleotide
tgtggaggtaaaaacctgatt

SEQ ID NO: 30373 - RNA, 21 nt, synthetic construct
  source 1..21: mol_type = other RNA; note = Description of Artificial Sequence: Synthetic oligonucleotide
tagtggaggtaaaaacctgtt

SEQ ID NO: 30374 - RNA, 21 nt, synthetic construct
  source 1..21: mol_type = other RNA; note = Description of Artificial Sequence: Synthetic oligonucleotide
tgagtggaggtaaaaaccttt

SEQ ID NO: 30375 - RNA, 21 nt, synthetic construct
  source 1..21: mol_type = other RNA; note = Description of Artificial Sequence: Synthetic oligonucleotide
ttgagtggaggtaaaaacctt

SEQ ID NO: 30376 - RNA, 21 nt, synthetic construct
  source 1..21: mol_type = other RNA; note = Description of Artificial Sequence: Synthetic oligonucleotide
tatgagtggaggtaaaaactt

SEQ ID NO: 30377 - RNA, 21 nt, synthetic construct
  source 1..21: mol_type = other RNA; note = Description of Artificial Sequence: Synthetic oligonucleotide
tgatgagtggaggtaaaaatt

SEQ ID NO: 30378 - RNA, 21 nt, synthetic construct
  source 1..21: mol_type = other RNA; note = Description of Artificial Sequence: Synthetic oligonucleotide
tggatgagtggaggtaaaatt

SEQ ID NO: 30379 - RNA, 21 nt, synthetic construct
  source 1..21: mol_type = other RNA; note = Description of Artificial Sequence: Synthetic oligonucleotide
taggatgagtggaggtaaatt

SEQ ID NO: 30380 - RNA, 21 nt, synthetic construct
  source 1..21: mol_type = other RNA; note = Description of Artificial Sequence: Synthetic oligonucleotide
taaggatgagtggaggtaatt

SEQ ID NO: 30381 - RNA, 21 nt, synthetic construct
  source 1..21: mol_type = other RNA; note = Description of Artificial Sequence: Synthetic oligonucleotide
ttaaggatgagtggaggtatt

SEQ ID NO: 30382 - RNA, 21 nt, synthetic construct
  source 1..21: mol_type = other RNA; note = Description of Artificial Sequence: Synthetic oligonucleotide
tctaaggatgagtggaggttt

SEQ ID NO: 30383 - RNA, 21 nt, synthetic construct
  source 1..21: mol_type = other RNA; note = Description of Artificial Sequence: Synthetic oligonucleotide
ttctaaggatgagtggaggtt

SEQ ID NO: 30384 - RNA, 21 nt, synthetic construct
  source 1..21: mol_type = other RNA; note = Description of Artificial Sequence: Synthetic oligonucleotide
tctctaaggatgagtggagtt

SEQ ID NO: 30385 - RNA, 21 nt, synthetic construct
  source 1..21: mol_type = other RNA; note = Description of Artificial Sequence: Synthetic oligonucleotide
tgctctaaggatgagtggatt

SEQ ID NO: 30386 - RNA, 21 nt, synthetic construct
  source 1..21: mol_type = other RNA; note = Description of Artificial Sequence: Synthetic oligonucleotide
tggctctaaggatgagtggtt

SEQ ID NO: 30387 - RNA, 21 nt, synthetic construct
  source 1..21: mol_type = other RNA; note = Description of Artificial Sequence: Synthetic oligonucleotide
tgggctctaaggatgagtgtt

SEQ ID NO: 30388 - RNA, 21 nt, synthetic construct
  source 1..21: mol_type = other RNA; note = Description of Artificial Sequence: Synthetic oligonucleotide
ttgggctctaaggatgagttt

SEQ ID NO: 30389 - RNA, 21 nt, synthetic construct
  source 1..21: mol_type = other RNA; note = Description of Artificial Sequence: Synthetic oligonucleotide
tgtgggctctaaggatgagtt

SEQ ID NO: 30390 - RNA, 21 nt, synthetic construct
  source 1..21: mol_type = other RNA; note = Description of Artificial Sequence: Synthetic oligonucleotide
tagtgggctctaaggatgatt

SEQ ID NO: 30391 - RNA, 21 nt, synthetic construct
  source 1..21: mol_type = other RNA; note = Description of Artificial Sequence: Synthetic oligonucleotide
tcagtgggctctaaggatgtt

SEQ ID NO: 30392 - RNA, 21 nt, synthetic construct
  source 1..21: mol_type = other RNA; note = Description of Artificial Sequence: Synthetic oligonucleotide
ttcagtgggctctaaggattt

SEQ ID NO: 30393 - RNA, 21 nt, synthetic construct
  source 1..21: mol_type = other RNA; note = Description of Artificial Sequence: Synthetic oligonucleotide
tgtcagtgggctctaaggatt

SEQ ID NO: 30394 - RNA, 21 nt, synthetic construct
  source 1..21: mol_type = other RNA; note = Description of Artificial Sequence: Synthetic oligonucleotide
tagtcagtgggctctaaggtt

SEQ ID NO: 30395 - RNA, 21 nt, synthetic construct
  source 1..21: mol_type = other RNA; note = Description of Artificial Sequence: Synthetic oligonucleotide
tcagtcagtgggctctaagtt

SEQ ID NO: 30396 - RNA, 21 nt, synthetic construct
  source 1..21: mol_type = other RNA; note = Description of Artificial Sequence: Synthetic oligonucleotide
tgcagtcagtgggctctaatt

SEQ ID NO: 30397 - RNA, 21 nt, synthetic construct
  source 1..21: mol_type = other RNA; note = Description of Artificial Sequence: Synthetic oligonucleotide
tagcagtcagtgggctctatt

SEQ ID NO: 30398 - RNA, 21 nt, synthetic construct
  source 1..21: mol_type = other RNA; note = Description of Artificial Sequence: Synthetic oligonucleotide
tgagcagtcagtgggctcttt

SEQ ID NO: 30399 - RNA, 21 nt, synthetic construct
  source 1..21: mol_type = other RNA; note = Description of Artificial Sequence: Synthetic oligonucleotide
tggagcagtcagtgggctctt

SEQ ID NO: 30400 - RNA, 21 nt, synthetic construct
  source 1..21: mol_type = other RNA; note = Description of Artificial Sequence: Synthetic oligonucleotide
tgggagcagtcagtgggcttt

SEQ ID NO: 30401 - RNA, 21 nt, synthetic construct
  source 1..21: mol_type = other RNA; note = Description of Artificial Sequence: Synthetic oligonucleotide
tggggagcagtcagtgggctt

SEQ ID NO: 30402 - RNA, 21 nt, synthetic construct
  source 1..21: mol_type = other RNA; note = Description of Artificial Sequence: Synthetic oligonucleotide
taggggagcagtcagtgggtt

SEQ ID NO: 30403 - RNA, 21 nt, synthetic construct
  source 1..21: mol_type = other RNA; note = Description of Artificial Sequence: Synthetic oligonucleotide
taaggggagcagtcagtggtt

SEQ ID NO: 30404 - RNA, 21 nt, synthetic construct
  source 1..21: mol_type = other RNA; note = Description of Artificial Sequence: Synthetic oligonucleotide
taaaggggagcagtcagtgtt

SEQ ID NO: 30405 - RNA, 21 nt, synthetic construct
  source 1..21: mol_type = other RNA; note = Description of Artificial Sequence: Synthetic oligonucleotide
ttaaaggggagcagtcagttt

SEQ ID NO: 30406 - RNA, 21 nt, synthetic construct
  source 1..21: mol_type = other RNA; note = Description of Artificial Sequence: Synthetic oligonucleotide
tataaaggggagcagtcagtt

SEQ ID NO: 30407 - RNA, 21 nt, synthetic construct
  source 1..21: mol_type = other RNA; note = Description of Artificial Sequence: Synthetic oligonucleotide
ttataaaggggagcagtcatt

SEQ ID NO: 30408 - RNA, 21 nt, synthetic construct
  source 1..21: mol_type = other RNA; note = Description of Artificial Sequence: Synthetic oligonucleotide
tgtataaaggggagcagtctt

SEQ ID NO: 30409 - RNA, 21 nt, synthetic construct
  source 1..21: mol_type = other RNA; note = Description of Artificial Sequence: Synthetic oligonucleotide
tggtataaaggggagcagttt

SEQ ID NO: 30410 - RNA, 21 nt, synthetic construct
  source 1..21: mol_type = other RNA; note = Description of Artificial Sequence: Synthetic oligonucleotide
taggtataaaggggagcagtt

SEQ ID NO: 30411 - RNA, 21 nt, synthetic construct
  source 1..21: mol_type = other RNA; note = Description of Artificial Sequence: Synthetic oligonucleotide
tcaggtataaaggggagcatt

SEQ ID NO: 30412 - RNA, 21 nt, synthetic construct
  source 1..21: mol_type = other RNA; note = Description of Artificial Sequence: Synthetic oligonucleotide
tacaggtataaaggggagctt

SEQ ID NO: 30413 - RNA, 21 nt, synthetic construct
  source 1..21: mol_type = other RNA; note = Description of Artificial Sequence: Synthetic oligonucleotide
taacaggtataaaggggagtt

SEQ ID NO: 30414 - RNA, 21 nt, synthetic construct
  source 1..21: mol_type = other RNA; note = Description of Artificial Sequence: Synthetic oligonucleotide
tcaacaggtataaaggggatt

SEQ ID NO: 30415 - RNA, 21 nt, synthetic construct
  source 1..21: mol_type = other RNA; note = Description of Artificial Sequence: Synthetic oligonucleotide
tccaacaggtataaaggggtt

SEQ ID NO: 30416 - RNA, 21 nt, synthetic construct
  source 1..21: mol_type = other RNA; note = Description of Artificial Sequence: Synthetic oligonucleotide
tgccaacaggtataaagggtt

SEQ ID NO: 30417 - RNA, 21 nt, synthetic construct
  source 1..21: mol_type = other RNA; note = Description of Artificial Sequence: Synthetic oligonucleotide
tggccaacaggtataaaggtt

SEQ ID NO: 30418 - RNA, 21 nt, synthetic construct
  source 1..21: mol_type = other RNA; note = Description of Artificial Sequence: Synthetic oligonucleotide
tgggccaacaggtataaagtt

SEQ ID NO: 30419 - RNA, 21 nt, synthetic construct
  source 1..21: mol_type = other RNA; note = Description of Artificial Sequence: Synthetic oligonucleotide
tagggccaacaggtataaatt

SEQ ID NO: 30420 - RNA, 21 nt, synthetic construct
  source 1..21: mol_type = other RNA; note = Description of Artificial Sequence: Synthetic oligonucleotide
tcagggccaacaggtataatt

SEQ ID NO: 30421 - RNA, 21 nt, synthetic construct
  source 1..21: mol_type = other RNA; note = Description of Artificial Sequence: Synthetic oligonucleotide
tgcagggccaacaggtatatt

SEQ ID NO: 30422 - RNA, 21 nt, synthetic construct
  source 1..21: mol_type = other RNA; note = Description of Artificial Sequence: Synthetic oligonucleotide
tggcagggccaacaggtattt

SEQ ID NO: 30423 - RNA, 21 nt, synthetic construct
  source 1..21: mol_type = other RNA; note = Description of Artificial Sequence: Synthetic oligonucleotide
taggcagggccaacaggtatt

SEQ ID NO: 30424 - RNA, 21 nt, synthetic construct
  source 1..21: mol_type = other RNA; note = Description of Artificial Sequence: Synthetic oligonucleotide
ttaggcagggccaacaggttt

SEQ ID NO: 30425 - RNA, 21 nt, synthetic construct
  source 1..21: mol_type = other RNA; note = Description of Artificial Sequence: Synthetic oligonucleotide
tataggcagggccaacaggtt

SEQ ID NO: 30426 - RNA, 21 nt, synthetic construct
  source 1..21: mol_type = other RNA; note = Description of Artificial Sequence: Synthetic oligonucleotide
ttataggcagggccaacagtt

SEQ ID NO: 30427 - RNA, 21 nt, synthetic construct
  source 1..21: mol_type = other RNA; note = Description of Artificial Sequence: Synthetic oligonucleotide
tctataggcagggccaacatt

SEQ ID NO: 30428 - RNA, 21 nt, synthetic construct
  source 1..21: mol_type = other RNA; note = Description of Artificial Sequence: Synthetic oligonucleotide
tcctataggcagggccaactt

SEQ ID NO: 30429 - RNA, 21 nt, synthetic construct
  source 1..21: mol_type = other RNA; note = Description of Artificial Sequence: Synthetic oligonucleotide
ttcctataggcagggccaatt

SEQ ID NO: 30430 - RNA, 21 nt, synthetic construct
  source 1..21: mol_type = other RNA; note = Description of Artificial Sequence: Synthetic oligonucleotide
tctcctataggcagggccatt

SEQ ID NO: 30431 - RNA, 21 nt, synthetic construct
  source 1..21: mol_type = other RNA; note = Description of Artificial Sequence: Synthetic oligonucleotide
ttctcctataggcagggcctt

SEQ ID NO: 30432 - RNA, 21 nt, synthetic construct
  source 1..21: mol_type = other RNA; note = Description of Artificial Sequence: Synthetic oligonucleotide
tctctcctataggcagggctt

SEQ ID NO: 30433 - RNA, 21 nt, synthetic construct
  source 1..21: mol_type = other RNA; note = Description of Artificial Sequence: Synthetic oligonucleotide
ttctctcctataggcagggtt

SEQ ID NO: 30434 - RNA, 21 nt, synthetic construct
  source 1..21: mol_type = other RNA; note = Description of Artificial Sequence: Synthetic oligonucleotide
tttctctcctataggcaggtt

SEQ ID NO: 30435 - RNA, 21 nt, synthetic construct
  source 1..21: mol_type = other RNA; note = Description of Artificial Sequence: Synthetic oligonucleotide
tattctctcctataggcagtt

SEQ ID NO: 30436 - RNA, 21 nt, synthetic construct
  source 1..21: mol_type = other RNA; note = Description of Artificial Sequence: Synthetic oligonucleotide
ttattctctcctataggcatt

SEQ ID NO: 30437 - RNA, 21 nt, synthetic construct
  source 1..21: mol_type = other RNA; note = Description of Artificial Sequence: Synthetic oligonucleotide
tatattctctcctataggctt

SEQ ID NO: 30438 - RNA, 21 nt, synthetic construct
  source 1..21: mol_type = other RNA; note = Description of Artificial Sequence: Synthetic oligonucleotide
taatattctctcctataggtt

SEQ ID NO: 30439 - RNA, 21 nt, synthetic construct
  source 1..21: mol_type = other RNA; note = Description of Artificial Sequence: Synthetic oligonucleotide
taaatattctctcctatagtt

SEQ ID NO: 30440 - RNA, 21 nt, synthetic construct
  source 1..21: mol_type = other RNA; note = Description of Artificial Sequence: Synthetic oligonucleotide
tcaaatattctctcctatatt

SEQ ID NO: 30441 - RNA, 21 nt, synthetic construct
  source 1..21: mol_type = other RNA; note = Description of Artificial Sequence: Synthetic oligonucleotide
tccaaatattctctcctattt

SEQ ID NO: 30442 - RNA, 21 nt, synthetic construct
  source 1..21: mol_type = other RNA; note = Description of Artificial Sequence: Synthetic oligonucleotide
ttccaaatattctctcctatt

SEQ ID NO: 30443 - RNA, 21 nt, synthetic construct
  source 1..21: mol_type = other RNA; note = Description of Artificial Sequence: Synthetic oligonucleotide
tctccaaatattctctccttt

SEQ ID NO: 30444 - RNA, 21 nt, synthetic construct
  source 1..21: mol_type = other RNA; note = Description of Artificial Sequence: Synthetic oligonucleotide
ttctccaaatattctctcctt

SEQ ID NO: 30445 - RNA, 21 nt, synthetic construct
  source 1..21: mol_type = other RNA; note = Description of Artificial Sequence: Synthetic oligonucleotide
tatctccaaatattctctctt

SEQ ID NO: 30446 - RNA, 21 nt, synthetic construct
  source 1..21: mol_type = other RNA; note = Description of Artificial Sequence: Synthetic oligonucleotide
ttatctccaaatattctcttt

SEQ ID NO: 30447 - RNA, 21 nt, synthetic construct
  source 1..21: mol_type = other RNA; note = Description of Artificial Sequence: Synthetic oligonucleotide
tctatctccaaatattctctt

SEQ ID NO: 30448 - RNA, 21 nt, synthetic construct
  source 1..21: mol_type = other RNA; note = Description of Artificial Sequence: Synthetic oligonucleotide
tcctatctccaaatattcttt

SEQ ID NO: 30449 - RNA, 21 nt, synthetic construct
  source 1..21: mol_type = other RNA; note = Description of Artificial Sequence: Synthetic oligonucleotide
tgcctatctccaaatattctt

SEQ ID NO: 30450 - RNA, 21 nt, synthetic construct
  source 1..21: mol_type = other RNA; note = Description of Artificial Sequence: Synthetic oligonucleotide
ttgcctatctccaaatatttt

SEQ ID NO: 30451 - RNA, 21 nt, synthetic construct
  source 1..21: mol_type = other RNA; note = Description of Artificial Sequence: Synthetic oligonucleotide
tctgcctatctccaaatattt

SEQ ID NO: 30452 - RNA, 21 nt, synthetic construct
  source 1..21: mol_type = other RNA; note = Description of Artificial Sequence: Synthetic oligonucleotide
tgctgcctatctccaaatatt

SEQ ID NO: 30453 - RNA, 21 nt, synthetic construct
  source 1..21: mol_type = other RNA; note = Description of Artificial Sequence: Synthetic oligonucleotide
tagctgcctatctccaaattt

SEQ ID NO: 30454 - RNA, 21 nt, synthetic construct
  source 1..21: mol_type = other RNA; note = Description of Artificial Sequence: Synthetic oligonucleotide
taagctgcctatctccaaatt

SEQ ID NO: 30455 - RNA, 21 nt, synthetic construct
  source 1..21: mol_type = other RNA; note = Description of Artificial Sequence: Synthetic oligonucleotide
tgaagctgcctatctccaatt

SEQ ID NO: 30456 - RNA, 21 nt, synthetic construct
  source 1..21: mol_type = other RNA; note = Description of Artificial Sequence: Synthetic oligonucleotide
ttgaagctgcctatctccatt

SEQ ID NO: 30457 - RNA, 21 nt, synthetic construct
  source 1..21: mol_type = other RNA; note = Description of Artificial Sequence: Synthetic oligonucleotide
tctgaagctgcctatctcctt

SEQ ID NO: 30458 - RNA, 21 nt, synthetic construct
  source 1..21: mol_type = other RNA; note = Description of Artificial Sequence: Synthetic oligonucleotide
tcctgaagctgcctatctctt

SEQ ID NO: 30459 - RNA, 21 nt, synthetic construct
  source 1..21: mol_type = other RNA; note = Description of Artificial Sequence: Synthetic oligonucleotide
ttcctgaagctgcctatcttt

SEQ ID NO: 30460 - RNA, 21 nt, synthetic construct
  source 1..21: mol_type = other RNA; note = Description of Artificial Sequence: Synthetic oligonucleotide
tatcctgaagctgcctatctt

SEQ ID NO: 30461 - RNA, 21 nt, synthetic construct
  source 1..21: mol_type = other RNA; note = Description of Artificial Sequence: Synthetic oligonucleotide
tcatcctgaagctgcctattt

SEQ ID NO: 30462 - RNA, 21 nt, synthetic construct
  source 1..21: mol_type = other RNA; note = Description of Artificial Sequence: Synthetic oligonucleotide
tgcatcctgaagctgcctatt

SEQ ID NO: 30463 - RNA, 21 nt, synthetic construct
  source 1..21: mol_type = other RNA; note = Description of Artificial Sequence: Synthetic oligonucleotide
ttgcatcctgaagctgccttt

SEQ ID NO: 30464 - RNA, 21 nt, synthetic construct
  source 1..21: mol_type = other RNA; note = Description of Artificial Sequence: Synthetic oligonucleotide
tatgcatcctgaagctgcctt

SEQ ID NO: 30465 - RNA, 21 nt, synthetic construct
  source 1..21: mol_type = other RNA; note = Description of Artificial Sequence: Synthetic oligonucleotide
taatgcatcctgaagctgctt

SEQ ID NO: 30466 - RNA, 21 nt, synthetic construct
  source 1..21: mol_type = other RNA; note = Description of Artificial Sequence: Synthetic oligonucleotide
tcaatgcatcctgaagctgtt

SEQ ID NO: 30467 - RNA, 21 nt, synthetic construct
  source 1..21: mol_type = other RNA; note = Description of Artificial Sequence: Synthetic oligonucleotide
tgcaatgcatcctgaagcttt

SEQ ID NO: 30468 - RNA, 21 nt, synthetic construct
  source 1..21: mol_type = other RNA; note = Description of Artificial Sequence: Synthetic oligonucleotide
ttgcaatgcatcctgaagctt

SEQ ID NO: 30469 - RNA, 21 nt, synthetic construct
  source 1..21: mol_type = other RNA; note = Description of Artificial Sequence: Synthetic oligonucleotide
tttgcaatgcatcctgaagtt

SEQ ID NO: 30470 - RNA, 21 nt, synthetic construct
  source 1..21: mol_type = other RNA; note = Description of Artificial Sequence: Synthetic oligonucleotide
tattgcaatgcatcctgaatt

SEQ ID NO: 30471 - RNA, 21 nt, synthetic construct
  source 1..21: mol_type = other RNA; note = Description of Artificial Sequence: Synthetic oligonucleotide
tgattgcaatgcatcctgatt

SEQ ID NO: 30472 - RNA, 21 nt, synthetic construct
  source 1..21: mol_type = other RNA; note = Description of Artificial Sequence: Synthetic oligonucleotide
ttgattgcaatgcatcctgtt

SEQ ID NO: 30473 - RNA, 21 nt, synthetic construct
  source 1..21: mol_type = other RNA; note = Description of Artificial Sequence: Synthetic oligonucleotide
tatgattgcaatgcatccttt

SEQ ID NO: 30474 - RNA, 21 nt, synthetic construct
  source 1..21: mol_type = other RNA; note = Description of Artificial Sequence: Synthetic oligonucleotide
tgatgattgcaatgcatcctt

SEQ ID NO: 30475 - RNA, 21 nt, synthetic construct
  source 1..21: mol_type = other RNA; note = Description of Artificial Sequence: Synthetic oligonucleotide
tggatgattgcaatgcatctt

SEQ ID NO: 30476 - RNA, 21 nt, synthetic construct
  source 1..21: mol_type = other RNA; note = Description of Artificial Sequence: Synthetic oligonucleotide
taggatgattgcaatgcattt

SEQ ID NO: 30477 - RNA, 21 nt, synthetic construct
  source 1..21: mol_type = other RNA; note = Description of Artificial Sequence: Synthetic oligonucleotide
taaggatgattgcaatgcatt

SEQ ID NO: 30478 - RNA, 21 nt, synthetic construct
  source 1..21: mol_type = other RNA; note = Description of Artificial Sequence: Synthetic oligonucleotide
taaaggatgattgcaatgctt

SEQ ID NO: 30479 - RNA, 21 nt, synthetic construct
  source 1..21: mol_type = other RNA; note = Description of Artificial Sequence: Synthetic oligonucleotide
taaaaggatgattgcaatgtt

SEQ ID NO: 30480 - RNA, 21 nt, synthetic construct
  source 1..21: mol_type = other RNA; note = Description of Artificial Sequence: Synthetic oligonucleotide
tgaaaaggatgattgcaattt

SEQ ID NO: 30481 - RNA, 21 nt, synthetic construct
  source 1..21: mol_type = other RNA; note = Description of Artificial Sequence: Synthetic oligonucleotide
tagaaaaggatgattgcaatt

SEQ ID NO: 30482 - RNA, 21 nt, synthetic construct
  source 1..21: mol_type = other RNA; note = Description of Artificial Sequence: Synthetic oligonucleotide
taagaaaaggatgattgcatt

SEQ ID NO: 30483 - RNA, 21 nt, synthetic construct
  source 1..21: mol_type = other RNA; note = Description of Artificial Sequence: Synthetic oligonucleotide
ttaagaaaaggatgattgctt

SEQ ID NO: 30484 - RNA, 21 nt, synthetic construct
  source 1..21: mol_type = other RNA; note = Description of Artificial Sequence: Synthetic oligonucleotide
tttaagaaaaggatgattgtt

SEQ ID NO: 30485 - RNA, 21 nt, synthetic construct
  source 1..21: mol_type = other RNA; note = Description of Artificial Sequence: Synthetic oligonucleotide
ttttaagaaaaggatgatttt

SEQ ID NO: 30486 - RNA, 21 nt, synthetic construct
  source 1..21: mol_type = other RNA; note = Description of Artificial Sequence: Synthetic oligonucleotide
tatttaagaaaaggatgattt

SEQ ID NO: 30487 - RNA, 21 nt, synthetic construct
  source 1..21: mol_type = other RNA; note = Description of Artificial Sequence: Synthetic oligonucleotide
taatttaagaaaaggatgatt

SEQ ID NO: 30488 - RNA, 21 nt, synthetic construct
  source 1..21: mol_type = other RNA; note = Description of Artificial Sequence: Synthetic oligonucleotide
ttaatttaagaaaaggatgtt

SEQ ID NO: 30489 - RNA, 21 nt, synthetic construct
  source 1..21: mol_type = other RNA; note = Description of Artificial Sequence: Synthetic oligonucleotide
tataatttaagaaaaggattt

SEQ ID NO: 30490 - RNA, 21 nt, synthetic construct
  source 1..21: mol_type = other RNA; note = Description of Artificial Sequence: Synthetic oligonucleotide
tcataatttaagaaaaggatt

SEQ ID NO: 30491 - RNA, 21 nt, synthetic construct
  source 1..21: mol_type = other RNA; note = Description of Artificial Sequence: Synthetic oligonucleotide
tacataatttaagaaaaggtt

SEQ ID NO: 30492 - RNA, 21 nt, synthetic construct
  source 1..21: mol_type = other RNA; note = Description of Artificial Sequence: Synthetic oligonucleotide
tgacataatttaagaaaagtt

SEQ ID NO: 30493 - RNA, 21 nt, synthetic construct
  source 1..21: mol_type = other RNA; note = Description of Artificial Sequence: Synthetic oligonucleotide
ttgacataatttaagaaaatt

SEQ ID NO: 30494 - RNA, 21 nt, synthetic construct
  source 1..21: mol_type = other RNA; note = Description of Artificial Sequence: Synthetic oligonucleotide
tgtgacataatttaagaaatt

SEQ ID NO: 30495 - RNA, 21 nt, synthetic construct
  source 1..21: mol_type = other RNA; note = Description of Artificial Sequence: Synthetic oligonucleotide
tagtgacataatttaagaatt

SEQ ID NO: 30496 - RNA, 21 nt, synthetic construct
  source 1..21: mol_type = other RNA; note = Description of Artificial Sequence: Synthetic oligonucleotide
ttagtgacataatttaagatt

SEQ ID NO: 30497 - RNA, 21 nt, synthetic construct
  source 1..21: mol_type = other RNA; note = Description of Artificial Sequence: Synthetic oligonucleotide
tctagtgacataatttaagtt

SEQ ID NO: 30498 - RNA, 21 nt, synthetic construct
  source 1..21: mol_type = other RNA; note = Description of Artificial Sequence: Synthetic oligonucleotide
tactagtgacataatttaatt

SEQ ID NO: 30499 - RNA, 21 nt, synthetic construct
  source 1..21: mol_type = other RNA; note = Description of Artificial Sequence: Synthetic oligonucleotide
tgactagtgacataatttatt

SEQ ID NO: 30500 - RNA, 21 nt, synthetic construct
  source 1..21: mol_type = other RNA; note = Description of Artificial Sequence: Synthetic oligonucleotide
tagactagtgacataattttt

SEQ ID NO: 30501 - RNA, 21 nt, synthetic construct
  source 1..21: mol_type = other RNA; note = Description of Artificial Sequence: Synthetic oligonucleotide
taagactagtgacataatttt

SEQ ID NO: 30502 - RNA, 21 nt, synthetic construct
  source 1..21: mol_type = other RNA; note = Description of Artificial Sequence: Synthetic oligonucleotide
taaagactagtgacataattt

SEQ ID NO: 30503 - RNA, 21 nt, synthetic construct
  source 1..21: mol_type = other RNA; note = Description of Artificial Sequence: Synthetic oligonucleotide
taaaagactagtgacataatt

SEQ ID NO: 30504 - RNA, 21 nt, synthetic construct
  source 1..21: mol_type = other RNA; note = Description of Artificial Sequence: Synthetic oligonucleotide
ttaaaagactagtgacatatt

SEQ ID NO: 30505 - RNA, 21 nt, synthetic construct
  source 1..21: mol_type = other RNA; note = Description of Artificial Sequence: Synthetic oligonucleotide
tataaaagactagtgacattt

SEQ ID NO: 30506 - RNA, 21 nt, synthetic construct
  source 1..21: mol_type = other RNA; note = Description of Artificial Sequence: Synthetic oligonucleotide
taataaaagactagtgacatt

SEQ ID NO: 30507 - RNA, 21 nt, synthetic construct
  source 1..21: mol_type = other RNA; note = Description of Artificial Sequence: Synthetic oligonucleotide
taaataaaagactagtgactt

SEQ ID NO: 30508 - RNA, 21 nt, synthetic construct
  source 1..21: mol_type = other RNA; note = Description of Artificial Sequence: Synthetic oligonucleotide
taaaataaaagactagtgatt

SEQ ID NO: 30509 - RNA, 21 nt, synthetic construct
  source 1..21: mol_type = other RNA; note = Description of Artificial Sequence: Synthetic oligonucleotide
taaaaataaaagactagtgtt

SEQ ID NO: 30510 - RNA, 21 nt, synthetic construct
  source 1..21: mol_type = other RNA; note = Description of Artificial Sequence: Synthetic oligonucleotide
taaaaaataaaagactagttt

SEQ ID NO: 30511 - RNA, 21 nt, synthetic construct
  source 1..21: mol_type = other RNA; note = Description of Artificial Sequence: Synthetic oligonucleotide
tgaaaaaataaaagactagtt

SEQ ID NO: 30512 - RNA, 21 nt, synthetic construct
  source 1..21: mol_type = other RNA; note = Description of Artificial Sequence: Synthetic oligonucleotide
tggaaaaaataaaagactatt

SEQ ID NO: 30513 - RNA, 21 nt, synthetic construct
  source 1..21: mol_type = other RNA; note = Description of Artificial Sequence: Synthetic oligonucleotide
tgggaaaaaataaaagacttt

SEQ ID NO: 30514 - RNA, 21 nt, synthetic construct
  source 1..21: mol_type = other RNA; note = Description of Artificial Sequence: Synthetic oligonucleotide
tggggaaaaaataaaagactt

SEQ ID NO: 30515 - RNA, 21 nt, synthetic construct
  source 1..21: mol_type = other RNA; note = Description of Artificial Sequence: Synthetic oligonucleotide
taggggaaaaaataaaagatt

SEQ ID NO: 30516 - RNA, 21 nt, synthetic construct
  source 1..21: mol_type = other RNA; note = Description of Artificial Sequence: Synthetic oligonucleotide
tgaggggaaaaaataaaagtt

SEQ ID NO: 30517 - RNA, 21 nt, synthetic construct
  source 1..21: mol_type = other RNA; note = Description of Artificial Sequence: Synthetic oligonucleotide
tagaggggaaaaaataaaatt

SEQ ID NO: 30518 - RNA, 21 nt, synthetic construct
  source 1..21: mol_type = other RNA; note = Description of Artificial Sequence: Synthetic oligonucleotide
taagaggggaaaaaataaatt

SEQ ID NO: 30519 - RNA, 21 nt, synthetic construct
  source 1..21: mol_type = other RNA; note = Description of Artificial Sequence: Synthetic oligonucleotide
tcaagaggggaaaaaataatt

SEQ ID NO: 30520 - RNA, 21 nt, synthetic construct
  source 1..21: mol_type = other RNA; note = Description of Artificial Sequence: Synthetic oligonucleotide
ttcaagaggggaaaaaatatt

SEQ ID NO: 30521 - RNA, 21 nt, synthetic construct
  source 1..21: mol_type = other RNA; note = Description of Artificial Sequence: Synthetic oligonucleotide
tttcaagaggggaaaaaattt

SEQ ID NO: 30522 - RNA, 21 nt, synthetic construct
  source 1..21: mol_type = other RNA; note = Description of Artificial Sequence: Synthetic oligonucleotide
tgttcaagaggggaaaaaatt

SEQ ID NO: 30523 - RNA, 21 nt, synthetic construct
  source 1..21: mol_type = other RNA; note = Description of Artificial Sequence: Synthetic oligonucleotide
tagttcaagaggggaaaaatt

SEQ ID NO: 30524 - RNA, 21 nt, synthetic construct
  source 1..21: mol_type = other RNA; note = Description of Artificial Sequence: Synthetic oligonucleotide
taagttcaagaggggaaaatt

SEQ ID NO: 30525 - RNA, 21 nt, synthetic construct
  source 1..21: mol_type = other RNA; note = Description of Artificial Sequence: Synthetic oligonucleotide
taaagttcaagaggggaaatt

SEQ ID NO: 30526 - RNA, 21 nt, synthetic construct
  source 1..21: mol_type = other RNA; note = Description of Artificial Sequence: Synthetic oligonucleotide
tgaaagttcaagaggggaatt

SEQ ID NO: 30527 - RNA, 21 nt, synthetic construct
  source 1..21: mol_type = other RNA; note = Description of Artificial Sequence: Synthetic oligonucleotide
tggaaagttcaagaggggatt

SEQ ID NO: 30528 - RNA, 21 nt, synthetic construct
  source 1..21: mol_type = other RNA; note = Description of Artificial Sequence: Synthetic oligonucleotide
taggaaagttcaagaggggtt

SEQ ID NO: 30529 - RNA, 21 nt, synthetic construct
  source 1..21: mol_type = other RNA; note = Description of Artificial Sequence: Synthetic oligonucleotide
tgaggaaagttcaagagggtt

SEQ ID NO: 30530 - RNA, 21 nt, synthetic construct
  source 1..21: mol_type = other RNA; note = Description of Artificial Sequence: Synthetic oligonucleotide
ttgaggaaagttcaagaggtt

SEQ ID NO: 30531 - RNA, 21 nt, synthetic construct
  source 1..21: mol_type = other RNA; note = Description of Artificial Sequence: Synthetic oligonucleotide
tgtgaggaaagttcaagagtt

SEQ ID NO: 30532 - RNA, 21 nt, synthetic construct
  source 1..21: mol_type = other RNA; note = Description of Artificial Sequence: Synthetic oligonucleotide
ttgtgaggaaagttcaagatt

SEQ ID NO: 30533 - RNA, 21 nt, synthetic construct
  source 1..21: mol_type = other RNA; note = Description of Artificial Sequence: Synthetic oligonucleotide
tgtgtgaggaaagttcaagtt

SEQ ID NO: 30534 - RNA, 21 nt, synthetic construct
  source 1..21: mol_type = other RNA; note = Description of Artificial Sequence: Synthetic oligonucleotide
tggtgtgaggaaagttcaatt

SEQ ID NO: 30535 - RNA, 21 nt, synthetic construct
  source 1..21: mol_type = other RNA; note = Description of Artificial Sequence: Synthetic oligonucleotide
taggtgtgaggaaagttcatt

SEQ ID NO: 30536 - RNA, 21 nt, synthetic construct
  source 1..21: mol_type = other RNA; note = Description of Artificial Sequence: Synthetic oligonucleotide
tcaggtgtgaggaaagttctt

SEQ ID NO: 30537 - RNA, 21 nt, synthetic construct
  source 1..21: mol_type = other RNA; note = Description of Artificial Sequence: Synthetic oligonucleotide
tccaggtgtgaggaaagtttt

SEQ ID NO: 30538 - RNA, 21 nt, synthetic construct
  source 1..21: mol_type = other RNA; note = Description of Artificial Sequence: Synthetic oligonucleotide
ttccaggtgtgaggaaagttt

SEQ ID NO: 30539 - RNA, 21 nt, synthetic construct
  source 1..21: mol_type = other RNA; note = Description of Artificial Sequence: Synthetic oligonucleotide
tttccaggtgtgaggaaagtt

SEQ ID NO: 30540 - RNA, 21 nt, synthetic construct
  source 1..21: mol_type = other RNA; note = Description of Artificial Sequence: Synthetic oligonucleotide
tcttccaggtgtgaggaaatt

SEQ ID NO: 30541 - RNA, 21 nt, synthetic construct
  source 1..21: mol_type = other RNA; note = Description of Artificial Sequence: Synthetic oligonucleotide
ttcttccaggtgtgaggaatt

SEQ ID NO: 30542 - RNA, 21 nt, synthetic construct
  source 1..21: mol_type = other RNA; note = Description of Artificial Sequence: Synthetic oligonucleotide
tttcttccaggtgtgaggatt

SEQ ID NO: 30543 - RNA, 21 nt, synthetic construct
  source 1..21: mol_type = other RNA; note = Description of Artificial Sequence: Synthetic oligonucleotide
ttttcttccaggtgtgaggtt

SEQ ID NO: 30544 - RNA, 21 nt, synthetic construct
  source 1..21: mol_type = other RNA; note = Description of Artificial Sequence: Synthetic oligonucleotide
tgtttcttccaggtgtgagtt

SEQ ID NO: 30545 - RNA, 21 nt, synthetic construct
  source 1..21: mol_type = other RNA; note = Description of Artificial Sequence: Synthetic oligonucleotide
ttgtttcttccaggtgtgatt

SEQ ID NO: 30546 - RNA, 21 nt, synthetic construct
  source 1..21: mol_type = other RNA; note = Description of Artificial Sequence: Synthetic oligonucleotide
tttgtttcttccaggtgtgtt

SEQ ID NO: 30547 - RNA, 21 nt, synthetic construct
  source 1..21: mol_type = other RNA; note = Description of Artificial Sequence: Synthetic oligonucleotide
ttttgtttcttccaggtgttt

SEQ ID NO: 30548 - RNA, 21 nt, synthetic construct
  source 1..21: mol_type = other RNA; note = Description of Artificial Sequence: Synthetic oligonucleotide
tctttgtttcttccaggtgtt

SEQ ID NO: 30549 - RNA, 21 nt, synthetic construct
  source 1..21: mol_type = other RNA; note = Description of Artificial Sequence: Synthetic oligonucleotide
tactttgtttcttccaggttt

SEQ ID NO: 30550 - RNA, 21 nt, synthetic construct
  source 1..21: mol_type = other RNA; note = Description of Artificial Sequence: Synthetic oligonucleotide
ttactttgtttcttccaggtt

SEQ ID NO: 30551 - RNA, 21 nt, synthetic construct
  source 1..21: mol_type = other RNA; note = Description of Artificial Sequence: Synthetic oligonucleotide
tctactttgtttcttccagtt

SEQ ID NO: 30552 - RNA, 21 nt, synthetic construct
  source 1..21: mol_type = other RNA; note = Description of Artificial Sequence: Synthetic oligonucleotide
tcctactttgtttcttccatt

SEQ ID NO: 30553 - RNA, 21 nt, synthetic construct
  source 1..21: mol_type = other RNA; note = Description of Artificial Sequence: Synthetic oligonucleotide
ttcctactttgtttcttcctt

SEQ ID NO: 30554 - RNA, 21 nt, synthetic construct
  source 1..21: mol_type = other RNA; note = Description of Artificial Sequence: Synthetic oligonucleotide
tttcctactttgtttcttctt

SEQ ID NO: 30555 - RNA, 21 nt, synthetic construct
  source 1..21: mol_type = other RNA; note = Description of Artificial Sequence: Synthetic oligonucleotide
ttttcctactttgtttctttt

SEQ ID NO: 30556 - RNA, 21 nt, synthetic construct
  source 1..21: mol_type = other RNA; note = Description of Artificial Sequence: Synthetic oligonucleotide
tttttcctactttgtttcttt

SEQ ID NO: 30557 - RNA, 21 nt, synthetic construct
  source 1..21: mol_type = other RNA; note = Description of Artificial Sequence: Synthetic oligonucleotide
ttttttcctactttgtttctt

SEQ ID NO: 30558 - RNA, 21 nt, synthetic construct
  source 1..21: mol_type = other RNA; note = Description of Artificial Sequence: Synthetic oligonucleotide
tctttttcctactttgttttt

SEQ ID NO: 30559 - RNA, 21 nt, synthetic construct
  source 1..21: mol_type = other RNA; note = Description of Artificial Sequence: Synthetic oligonucleotide
tactttttcctactttgtttt

SEQ ID NO: 30560 - RNA, 21 nt, synthetic construct
  source 1..21: mol_type = other RNA; note = Description of Artificial Sequence: Synthetic oligonucleotide
tcactttttcctactttgttt

SEQ ID NO: 30561 - RNA, 21 nt, synthetic construct
  source 1..21: mol_type = other RNA; note = Description of Artificial Sequence: Synthetic oligonucleotide
ttcactttttcctactttgtt

SEQ ID NO: 30562 - RNA, 21 nt, synthetic construct
  source 1..21: mol_type = other RNA; note = Description of Artificial Sequence: Synthetic oligonucleotide
tttcactttttcctacttttt

SEQ ID NO: 30563 - RNA, 21 nt, synthetic construct
  source 1..21: mol_type = other RNA; note = Description of Artificial Sequence: Synthetic oligonucleotide
tgttcactttttcctactttt

SEQ ID NO: 30564 - RNA, 21 nt, synthetic construct
  source 1..21: mol_type = other RNA; note = Description of Artificial Sequence: Synthetic oligonucleotide
ttgttcactttttcctacttt

SEQ ID NO: 30565 - RNA, 21 nt, synthetic construct
  source 1..21: mol_type = other RNA; note = Description of Artificial Sequence: Synthetic oligonucleotide
tctgttcactttttcctactt

SEQ ID NO: 30566 - RNA, 21 nt, synthetic construct
  source 1..21: mol_type = other RNA; note = Description of Artificial Sequence: Synthetic oligonucleotide
tcctgttcactttttcctatt

SEQ ID NO: 30567 - RNA, 21 nt, synthetic construct
  source 1..21: mol_type = other RNA; note = Description of Artificial Sequence: Synthetic oligonucleotide
tccctgttcactttttccttt

SEQ ID NO: 30568 - RNA, 21 nt, synthetic construct
  source 1..21: mol_type = other RNA; note = Description of Artificial Sequence: Synthetic oligonucleotide
tcccctgttcactttttcctt

SEQ ID NO: 30569 - RNA, 21 nt, synthetic construct
  source 1..21: mol_type = other RNA; note = Description of Artificial Sequence: Synthetic oligonucleotide
ttcccctgttcactttttctt

SEQ ID NO: 30570 - RNA, 21 nt, synthetic construct
  source 1..21: mol_type = other RNA; note = Description of Artificial Sequence: Synthetic oligonucleotide
tatcccctgttcacttttttt

SEQ ID NO: 30571 - RNA, 21 nt, synthetic construct
  source 1..21: mol_type = other RNA; note = Description of Artificial Sequence: Synthetic oligonucleotide
tcatcccctgttcactttttt

SEQ ID NO: 30572 - RNA, 21 nt, synthetic construct
  source 1..21: mol_type = other RNA; note = Description of Artificial Sequence: Synthetic oligonucleotide
tacatcccctgttcacttttt

SEQ ID NO: 30573 - RNA, 21 nt, synthetic construct
  source 1..21: mol_type = other RNA; note = Description of Artificial Sequence: Synthetic oligonucleotide
tgacatcccctgttcactttt

SEQ ID NO: 30574 - RNA, 21 nt, synthetic construct
  source 1..21: mol_type = other RNA; note = Description of Artificial Sequence: Synthetic oligonucleotide
ttgacatcccctgttcacttt

SEQ ID NO: 30575 - RNA, 21 nt, synthetic construct
  source 1..21: mol_type = other RNA; note = Description of Artificial Sequence: Synthetic oligonucleotide
tttgacatcccctgttcactt

SEQ ID NO: 30576 - RNA, 21 nt, synthetic construct
  source 1..21: mol_type = other RNA; note = Description of Artificial Sequence: Synthetic oligonucleotide
ttttgacatcccctgttcatt

SEQ ID NO: 30577 - RNA, 21 nt, synthetic construct
  source 1..21: mol_type = other RNA; note = Description of Artificial Sequence: Synthetic oligonucleotide
tatttgacatcccctgttctt

SEQ ID NO: 30578 - RNA, 21 nt, synthetic construct
  source 1..21: mol_type = other RNA; note = Description of Artificial Sequence: Synthetic oligonucleotide
tgatttgacatcccctgtttt

SEQ ID NO: 30579 - RNA, 21 nt, synthetic construct
  source 1..21: mol_type = other RNA; note = Description of Artificial Sequence: Synthetic oligonucleotide
tcgatttgacatcccctgttt

SEQ ID NO: 30580 - RNA, 21 nt, synthetic construct
  source 1..21: mol_type = other RNA; note = Description of Artificial Sequence: Synthetic oligonucleotide
ttcgatttgacatcccctgtt

SEQ ID NO: 30581 - RNA, 21 nt, synthetic construct
  source 1..21: mol_type = other RNA; note = Description of Artificial Sequence: Synthetic oligonucleotide
tatcgatttgacatccccttt

SEQ ID NO: 30582 - RNA, 21 nt, synthetic construct
  source 1..21: mol_type = other RNA; note = Description of Artificial Sequence: Synthetic oligonucleotide
taatcgatttgacatcccctt

SEQ ID NO: 30583 - RNA, 21 nt, synthetic construct
  source 1..21: mol_type = other RNA; note = Description of Artificial Sequence: Synthetic oligonucleotide
tgaatcgatttgacatccctt

SEQ ID NO: 30584 - RNA, 21 nt, synthetic construct
  source 1..21: mol_type = other RNA; note = Description of Artificial Sequence: Synthetic oligonucleotide
tagaatcgatttgacatcctt

SEQ ID NO: 30585 - RNA, 21 nt, synthetic construct
  source 1..21: mol_type = other RNA; note = Description of Artificial Sequence: Synthetic oligonucleotide
taagaatcgatttgacatctt

SEQ ID NO: 30586 - RNA, 21 nt, synthetic construct
  source 1..21: mol_type = other RNA; note = Description of Artificial Sequence: Synthetic oligonucleotide
tcaagaatcgatttgacattt

SEQ ID NO: 30587 - RNA, 21 nt, synthetic construct
  source 1..21: mol_type = other RNA; note = Description of Artificial Sequence: Synthetic oligonucleotide
ttcaagaatcgatttgacatt

SEQ ID NO: 30588 - RNA, 21 nt, synthetic construct
  source 1..21: mol_type = other RNA; note = Description of Artificial Sequence: Synthetic oligonucleotide
tttcaagaatcgatttgactt

SEQ ID NO: 30589 - RNA, 21 nt, synthetic construct
  source 1..21: mol_type = other RNA; note = Description of Artificial Sequence: Synthetic oligonucleotide
tattcaagaatcgatttgatt

SEQ ID NO: 30590 - RNA, 21 nt, synthetic construct
  source 1..21: mol_type = other RNA; note = Description of Artificial Sequence: Synthetic oligonucleotide
taattcaagaatcgatttgtt

SEQ ID NO: 30591 - RNA, 21 nt, synthetic construct
  source 1..21: mol_type = other RNA; note = Description of Artificial Sequence: Synthetic oligonucleotide
tgaattcaagaatcgattttt

SEQ ID NO: 30592 - RNA, 21 nt, synthetic construct
  source 1..21: mol_type = other RNA; note = Description of Artificial Sequence: Synthetic oligonucleotide
tggaattcaagaatcgatttt

SEQ ID NO: 30593 - RNA, 21 nt, synthetic construct
  source 1..21: mol_type = other RNA; note = Description of Artificial Sequence: Synthetic oligonucleotide
tgggaattcaagaatcgattt

SEQ ID NO: 30594 - RNA, 21 nt, synthetic construct
  source 1..21: mol_type = other RNA; note = Description of Artificial Sequence: Synthetic oligonucleotide
tcgggaattcaagaatcgatt

SEQ ID NO: 30595 - RNA, 21 nt, synthetic construct
  source 1..21: mol_type = other RNA; note = Description of Artificial Sequence: Synthetic oligonucleotide
tgcgggaattcaagaatcgtt

SEQ ID NO: 30596 - RNA, 21 nt, synthetic construct
  source 1..21: mol_type = other RNA; note = Description of Artificial Sequence: Synthetic oligonucleotide
tagcgggaattcaagaatctt

SEQ ID NO: 30597 - RNA, 21 nt, synthetic construct
  source 1..21: mol_type = other RNA; note = Description of Artificial Sequence: Synthetic oligonucleotide
tcagcgggaattcaagaattt

SEQ ID NO: 30598 - RNA, 21 nt, synthetic construct
  source 1..21: mol_type = other RNA; note = Description of Artificial Sequence: Synthetic oligonucleotide
tgcagcgggaattcaagaatt

SEQ ID NO: 30599 - RNA, 21 nt, synthetic construct
  source 1..21: mol_type = other RNA; note = Description of Artificial Sequence: Synthetic oligonucleotide
ttgcagcgggaattcaagatt

SEQ ID NO: 30600 - RNA, 21 nt, synthetic construct
  source 1..21: mol_type = other RNA; note = Description of Artificial Sequence: Synthetic oligonucleotide
tttgcagcgggaattcaagtt

SEQ ID NO: 30601 - RNA, 21 nt, synthetic construct
  source 1..21: mol_type = other RNA; note = Description of Artificial Sequence: Synthetic oligonucleotide
tcttgcagcgggaattcaatt

SEQ ID NO: 30602 - RNA, 21 nt, synthetic construct
  source 1..21: mol_type = other RNA; note = Description of Artificial Sequence: Synthetic oligonucleotide
tgcttgcagcgggaattcatt

SEQ ID NO: 30603 - RNA, 21 nt, synthetic construct
  source 1..21: mol_type = other RNA; note = Description of Artificial Sequence: Synthetic oligonucleotide
tagcttgcagcgggaattctt

SEQ ID NO: 30604 - RNA, 21 nt, synthetic construct
  source 1..21: mol_type = other RNA; note = Description of Artificial Sequence: Synthetic oligonucleotide
ttagcttgcagcgggaatttt

SEQ ID NO: 30605 - RNA, 21 nt, synthetic construct
  source 1..21: mol_type = other RNA; note = Description of Artificial Sequence: Synthetic oligonucleotide
tctagcttgcagcgggaattt

SEQ ID NO: 30606 - RNA, 21 nt, synthetic construct
  source 1..21: mol_type = other RNA; note = Description of Artificial Sequence: Synthetic oligonucleotide
ttctagcttgcagcgggaatt

SEQ ID NO: 30607 - RNA, 21 nt, synthetic construct
  source 1..21: mol_type = other RNA; note = Description of Artificial Sequence: Synthetic oligonucleotide
tctctagcttgcagcgggatt

SEQ ID NO: 30608 - RNA, 21 nt, synthetic construct
  source 1..21: mol_type = other RNA; note = Description of Artificial Sequence: Synthetic oligonucleotide
tgctctagcttgcagcgggtt

SEQ ID NO: 30609 - RNA, 21 nt, synthetic construct
  source 1..21: mol_type = other RNA; note = Description of Artificial Sequence: Synthetic oligonucleotide
tggctctagcttgcagcggtt

SEQ ID NO: 30610 - RNA, 21 nt, synthetic construct
  source 1..21: mol_type = other RNA; note = Description of Artificial Sequence: Synthetic oligonucleotide
tcggctctagcttgcagcgtt

SEQ ID NO: 30611 - RNA, 21 nt, synthetic construct
  source 1..21: mol_type = other RNA; note = Description of Artificial Sequence: Synthetic oligonucleotide
tgcggctctagcttgcagctt

SEQ ID NO: 30612 - RNA, 21 nt, synthetic construct
  source 1..21: mol_type = other RNA; note = Description of Artificial Sequence: Synthetic oligonucleotide
ttgcggctctagcttgcagtt

SEQ ID NO: 30613 - RNA, 21 nt, synthetic construct
  source 1..21: mol_type = other RNA; note = Description of Artificial Sequence: Synthetic oligonucleotide
tctgcggctctagcttgcatt

SEQ ID NO: 30614 - RNA, 21 nt, synthetic construct
  source 1..21: mol_type = other RNA; note = Description of Artificial Sequence: Synthetic oligonucleotide
tcctgcggctctagcttgctt

SEQ ID NO: 30615 - RNA, 21 nt, synthetic construct
  source 1..21: mol_type = other RNA; note = Description of Artificial Sequence: Synthetic oligonucleotide
tgcctgcggctctagcttgtt

SEQ ID NO: 30616 - RNA, 21 nt, synthetic construct
  source 1..21: mol_type = other RNA; note = Description of Artificial Sequence: Synthetic oligonucleotide
ttgcctgcggctctagctttt

SEQ ID NO: 30617 - RNA, 21 nt, synthetic construct
  source 1..21: mol_type = other RNA; note = Description of Artificial Sequence: Synthetic oligonucleotide
tgtgcctgcggctctagcttt

SEQ ID NO: 30618 - RNA, 21 nt, synthetic construct
  source 1..21: mol_type = other RNA; note = Description of Artificial Sequence: Synthetic oligonucleotide
tggtgcctgcggctctagctt

SEQ ID NO: 30619 - RNA, 21 nt, synthetic construct
  source 1..21: mol_type = other RNA; note = Description of Artificial Sequence: Synthetic oligonucleotide
tgggtgcctgcggctctagtt

SEQ ID NO: 30620 - RNA, 21 nt, synthetic construct
  source 1..21: mol_type = other RNA; note = Description of Artificial Sequence: Synthetic oligonucleotide
tagggtgcctgcggctctatt

SEQ ID NO: 30621 - RNA, 21 nt, synthetic construct
  source 1..21: mol_type = other RNA; note = Description of Artificial Sequence: Synthetic oligonucleotide
tgagggtgcctgcggctcttt

SEQ ID NO: 30622 - RNA, 21 nt, synthetic construct
  source 1..21: mol_type = other RNA; note = Description of Artificial Sequence: Synthetic oligonucleotide
tagagggtgcctgcggctctt

SEQ ID NO: 30623 - RNA, 21 nt, synthetic construct
  source 1..21: mol_type = other RNA; note = Description of Artificial Sequence: Synthetic oligonucleotide
tgagagggtgcctgcggcttt

SEQ ID NO: 30624 - RNA, 21 nt, synthetic construct
  source 1..21: mol_type = other RNA; note = Description of Artificial Sequence: Synthetic oligonucleotide
ttgagagggtgcctgcggctt

SEQ ID NO: 30625 - RNA, 21 nt, synthetic construct
  source 1..21: mol_type = other RNA; note = Description of Artificial Sequence: Synthetic oligonucleotide
tgtgagagggtgcctgcggtt

SEQ ID NO: 30626 - RNA, 21 nt, synthetic construct
  source 1..21: mol_type = other RNA; note = Description of Artificial Sequence: Synthetic oligonucleotide
tagtgagagggtgcctgcgtt

SEQ ID NO: 30627 - RNA, 21 nt, synthetic construct
  source 1..21: mol_type = other RNA; note = Description of Artificial Sequence: Synthetic oligonucleotide
tgagtgagagggtgcctgctt

SEQ ID NO: 30628 - RNA, 21 nt, synthetic construct
  source 1..21: mol_type = other RNA; note = Description of Artificial Sequence: Synthetic oligonucleotide
ttgagtgagagggtgcctgtt

SEQ ID NO: 30629 - RNA, 21 nt, synthetic construct
  source 1..21: mol_type = other RNA; note = Description of Artificial Sequence: Synthetic oligonucleotide
tttgagtgagagggtgccttt

SEQ ID NO: 30630 - RNA, 21 nt, synthetic construct
  source 1..21: mol_type = other RNA; note = Description of Artificial Sequence: Synthetic oligonucleotide
tattgagtgagagggtgcctt

SEQ ID NO: 30631 - RNA, 21 nt, synthetic construct
  source 1..21: mol_type = other RNA; note = Description of Artificial Sequence: Synthetic oligonucleotide
taattgagtgagagggtgctt

SEQ ID NO: 30632 - RNA, 21 nt, synthetic construct
  source 1..21: mol_type = other RNA; note = Description of Artificial Sequence: Synthetic oligonucleotide
taaattgagtgagagggtgtt

SEQ ID NO: 30633 - RNA, 21 nt, synthetic construct
  source 1..21: mol_type = other RNA; note = Description of Artificial Sequence: Synthetic oligonucleotide
tgaaattgagtgagagggttt

SEQ ID NO: 30634 - RNA, 21 nt, synthetic construct
  source 1..21: mol_type = other RNA; note = Description of Artificial Sequence: Synthetic oligonucleotide
tggaaattgagtgagagggtt

SEQ ID NO: 30635 - RNA, 21 nt, synthetic construct
  source 1..21: mol_type = other RNA; note = Description of Artificial Sequence: Synthetic oligonucleotide
ttggaaattgagtgagaggtt

SEQ ID NO: 30636 - RNA, 21 nt, synthetic construct
  source 1..21: mol_type = other RNA; note = Description of Artificial Sequence: Synthetic oligonucleotide
tgtggaaattgagtgagagtt

SEQ ID NO: 30637 - RNA, 21 nt, synthetic construct
  source 1..21: mol_type = other RNA; note = Description of Artificial Sequence: Synthetic oligonucleotide
tagtggaaattgagtgagatt

SEQ ID NO: 30638 - RNA, 21 nt, synthetic construct
  source 1..21: mol_type = other RNA; note = Description of Artificial Sequence: Synthetic oligonucleotide
tgagtggaaattgagtgagtt

SEQ ID NO: 30639 - RNA, 21 nt, synthetic construct
  source 1..21: mol_type = other RNA; note = Description of Artificial Sequence: Synthetic oligonucleotide
ttgagtggaaattgagtgatt

SEQ ID NO: 30640 - RNA, 21 nt, synthetic construct
  source 1..21: mol_type = other RNA; note = Description of Artificial Sequence: Synthetic oligonucleotide
tctgagtggaaattgagtgtt

SEQ ID NO: 30641 - RNA, 21 nt, synthetic construct
  source 1..21: mol_type = other RNA; note = Description of Artificial Sequence: Synthetic oligonucleotide
ttctgagtggaaattgagttt

SEQ ID NO: 30642 - RNA, 21 nt, synthetic construct
  source 1..21: mol_type = other RNA; note = Description of Artificial Sequence: Synthetic oligonucleotide
tttctgagtggaaattgagtt

SEQ ID NO: 30643 - RNA, 21 nt, synthetic construct
  source 1..21: mol_type = other RNA; note = Description of Artificial Sequence: Synthetic oligonucleotide
tgttctgagtggaaattgatt

SEQ ID NO: 30644 - RNA, 21 nt, synthetic construct
  source 1..21: mol_type = other RNA; note = Description of Artificial Sequence: Synthetic oligonucleotide
tggttctgagtggaaattgtt

SEQ ID NO: 30645 - RNA, 21 nt, synthetic construct
  source 1..21: mol_type = other RNA; note = Description of Artificial Sequence: Synthetic oligonucleotide
tgggttctgagtggaaatttt

SEQ ID NO: 30646 - RNA, 21 nt, synthetic construct
  source 1..21: mol_type = other RNA; note = Description of Artificial Sequence: Synthetic oligonucleotide
tagggttctgagtggaaattt

SEQ ID NO: 30647 - RNA, 21 nt, synthetic construct
  source 1..21: mol_type = other RNA; note = Description of Artificial Sequence: Synthetic oligonucleotide
ttagggttctgagtggaaatt

SEQ ID NO: 30648 - RNA, 21 nt, synthetic construct
  source 1..21: mol_type = other RNA; note = Description of Artificial Sequence: Synthetic oligonucleotide
tatagggttctgagtggaatt

SEQ ID NO: 30649 - RNA, 21 nt, synthetic construct
  source 1..21: mol_type = other RNA; note = Description of Artificial Sequence: Synthetic oligonucleotide
ttatagggttctgagtggatt

SEQ ID NO: 30650 - RNA, 21 nt, synthetic construct
  source 1..21: mol_type = other RNA; note = Description of Artificial Sequence: Synthetic oligonucleotide
tttatagggttctgagtggtt

SEQ ID NO: 30651 - RNA, 21 nt, synthetic construct
  source 1..21: mol_type = other RNA; note = Description of Artificial Sequence: Synthetic oligonucleotide
ttttatagggttctgagtgtt

SEQ ID NO: 30652 - RNA, 21 nt, synthetic construct
  source 1..21: mol_type = other RNA; note = Description of Artificial Sequence: Synthetic oligonucleotide
tgtttatagggttctgagttt

SEQ ID NO: 30653 - RNA, 21 nt, synthetic construct
  source 1..21: mol_type = other RNA; note = Description of Artificial Sequence: Synthetic oligonucleotide
ttgtttatagggttctgagtt

SEQ ID NO: 30654 - RNA, 21 nt, synthetic construct
  source 1..21: mol_type = other RNA; note = Description of Artificial Sequence: Synthetic oligonucleotide
tgtgtttatagggttctgatt

SEQ ID NO: 30655 - RNA, 21 nt, synthetic construct
  source 1..21: mol_type = other RNA; note = Description of Artificial Sequence: Synthetic oligonucleotide
tggtgtttatagggttctgtt

SEQ ID NO: 30656 - RNA, 21 nt, synthetic construct
  source 1..21: mol_type = other RNA; note = Description of Artificial Sequence: Synthetic oligonucleotide
ttggtgtttatagggttcttt

SEQ ID NO: 30657 - RNA, 21 nt, synthetic construct
  source 1..21: mol_type = other RNA; note = Description of Artificial Sequence: Synthetic oligonucleotide
tctggtgtttatagggttctt

SEQ ID NO: 30658 - RNA, 21 nt, synthetic construct
  source 1..21: mol_type = other RNA; note = Description of Artificial Sequence: Synthetic oligonucleotide
tactggtgtttatagggtttt

SEQ ID NO: 30659 - RNA, 21 nt, synthetic construct
  source 1..21: mol_type = other RNA; note = Description of Artificial Sequence: Synthetic oligonucleotide
tcactggtgtttatagggttt

SEQ ID NO: 30660 - RNA, 21 nt, synthetic construct
  source 1..21: mol_type = other RNA; note = Description of Artificial Sequence: Synthetic oligonucleotide
tccactggtgtttatagggtt

SEQ ID NO: 30661 - RNA, 21 nt, synthetic construct
  source 1..21: mol_type = other RNA; note = Description of Artificial Sequence: Synthetic oligonucleotide
tcccactggtgtttataggtt

SEQ ID NO: 30662 - RNA, 21 nt, synthetic construct
  source 1..21: mol_type = other RNA; note = Description of Artificial Sequence: Synthetic oligonucleotide
ttcccactggtgtttatagtt

SEQ ID NO: 30663 - RNA, 21 nt, synthetic construct
  source 1..21: mol_type = other RNA; note = Description of Artificial Sequence: Synthetic oligonucleotide
tttcccactggtgtttatatt

SEQ ID NO: 30664 - RNA, 21 nt, synthetic construct
  source 1..21: mol_type = other RNA; note = Description of Artificial Sequence: Synthetic oligonucleotide
tcttcccactggtgtttattt

SEQ ID NO: 30665 - RNA, 21 nt, synthetic construct
  source 1..21: mol_type = other RNA; note = Description of Artificial Sequence: Synthetic oligonucleotide
tccttcccactggtgtttatt

SEQ ID NO: 30666 - RNA, 21 nt, synthetic construct
  source 1..21: mol_type = other RNA; note = Description of Artificial Sequence: Synthetic oligonucleotide
tcccttcccactggtgttttt

SEQ ID NO: 30667 - RNA, 21 nt, synthetic construct
  source 1..21: mol_type = other RNA; note = Description of Artificial Sequence: Synthetic oligonucleotide
tgcccttcccactggtgtttt

SEQ ID NO: 30668 - RNA, 21 nt, synthetic construct
  source 1..21: mol_type = other RNA; note = Description of Artificial Sequence: Synthetic oligonucleotide
ttgcccttcccactggtgttt

SEQ ID NO: 30669 - RNA, 21 nt, synthetic construct
  source 1..21: mol_type = other RNA; note = Description of Artificial Sequence: Synthetic oligonucleotide
tttgcccttcccactggtgtt

SEQ ID NO: 30670 - RNA, 21 nt, synthetic construct
  source 1..21: mol_type = other RNA; note = Description of Artificial Sequence: Synthetic oligonucleotide
tgttgcccttcccactggttt

SEQ ID NO: 30671 - RNA, 21 nt, synthetic construct
  source 1..21: mol_type = other RNA; note = Description of Artificial Sequence: Synthetic oligonucleotide
tggttgcccttcccactggtt

SEQ ID NO: 30672 - RNA, 21 nt, synthetic construct
  source 1..21: mol_type = other RNA; note = Description of Artificial Sequence: Synthetic oligonucleotide
tgggttgcccttcccactgtt

SEQ ID NO: 30673 - RNA, 21 nt, synthetic construct
  source 1..21: mol_type = other RNA; note = Description of Artificial Sequence: Synthetic oligonucleotide
ttgggttgcccttcccacttt

SEQ ID NO: 30674 - RNA, 21 nt, synthetic construct
  source 1..21: mol_type = other RNA; note = Description of Artificial Sequence: Synthetic oligonucleotide
tgtgggttgcccttcccactt

SEQ ID NO: 30675 - RNA, 21 nt, synthetic construct
  source 1..21: mol_type = other RNA; note = Description of Artificial Sequence: Synthetic oligonucleotide
tagtgggttgcccttcccatt

SEQ ID NO: 30676 - RNA, 21 nt, synthetic construct
  source 1..21: mol_type = other RNA; note = Description of Artificial Sequence: Synthetic oligonucleotide
tcagtgggttgcccttccctt

SEQ ID NO: 30677 - RNA, 21 nt, synthetic construct
  source 1..21: mol_type = other RNA; note = Description of Artificial Sequence: Synthetic oligonucleotide
tgcagtgggttgcccttcctt

SEQ ID NO: 30678 - RNA, 21 nt, synthetic construct
  source 1..21: mol_type = other RNA; note = Description of Artificial Sequence: Synthetic oligonucleotide
ttgcagtgggttgcccttctt

SEQ ID NO: 30679 - RNA, 21 nt, synthetic construct
  source 1..21: mol_type = other RNA; note = Description of Artificial Sequence: Synthetic oligonucleotide
tgtgcagtgggttgccctttt

SEQ ID NO: 30680 - RNA, 21 nt, synthetic construct
  source 1..21: mol_type = other RNA; note = Description of Artificial Sequence: Synthetic oligonucleotide
tcgtgcagtgggttgcccttt

SEQ ID NO: 30681 - RNA, 21 nt, synthetic construct
  source 1..21: mol_type = other RNA; note = Description of Artificial Sequence: Synthetic oligonucleotide
tacgtgcagtgggttgccctt

SEQ ID NO: 30682 - RNA, 21 nt, synthetic construct
  source 1..21: mol_type = other RNA; note = Description of Artificial Sequence: Synthetic oligonucleotide
tcacgtgcagtgggttgcctt

SEQ ID NO: 30683 - RNA, 21 nt, synthetic construct
  source 1..21: mol_type = other RNA; note = Description of Artificial Sequence: Synthetic oligonucleotide
tccacgtgcagtgggttgctt

SEQ ID NO: 30684 - RNA, 21 nt, synthetic construct
  source 1..21: mol_type = other RNA; note = Description of Artificial Sequence: Synthetic oligonucleotide
tcccacgtgcagtgggttgtt

SEQ ID NO: 30685 - RNA, 21 nt, synthetic construct
  source 1..21: mol_type = other RNA; note = Description of Artificial Sequence: Synthetic oligonucleotide
ttcccacgtgcagtgggtttt

SEQ ID NO: 30686 - RNA, 21 nt, synthetic construct
  source 1..21: mol_type = other RNA; note = Description of Artificial Sequence: Synthetic oligonucleotide
tttcccacgtgcagtgggttt

SEQ ID NO: 30687 - RNA, 21 nt, synthetic construct
  source 1..21: mol_type = other RNA; note = Description of Artificial Sequence: Synthetic oligonucleotide
tattcccacgtgcagtgggtt

SEQ ID NO: 30688 - RNA, 21 nt, synthetic construct
  source 1..21: mol_type = other RNA; note = Description of Artificial Sequence: Synthetic oligonucleotide
tcattcccacgtgcagtggtt

SEQ ID NO: 30689 - RNA, 21 nt, synthetic construct
  source 1..21: mol_type = other RNA; note = Description of Artificial Sequence: Synthetic oligonucleotide
tgcattcccacgtgcagtgtt

SEQ ID NO: 30690 - RNA, 21 nt, synthetic construct
  source 1..21: mol_type = other RNA; note = Description of Artificial Sequence: Synthetic oligonucleotide
ttgcattcccacgtgcagttt

SEQ ID NO: 30691 - RNA, 21 nt, synthetic construct
  source 1..21: mol_type = other RNA; note = Description of Artificial Sequence: Synthetic oligonucleotide
tgtgcattcccacgtgcagtt

SEQ ID NO: 30692 - RNA, 21 nt, synthetic construct
  source 1..21: mol_type = other RNA; note = Description of Artificial Sequence: Synthetic oligonucleotide
tagtgcattcccacgtgcatt

SEQ ID NO: 30693 - RNA, 21 nt, synthetic construct
  source 1..21: mol_type = other RNA; note = Description of Artificial Sequence: Synthetic oligonucleotide
tcagtgcattcccacgtgctt

SEQ ID NO: 30694 - RNA, 21 nt, synthetic construct
  source 1..21: mol_type = other RNA; note = Description of Artificial Sequence: Synthetic oligonucleotide
ttcagtgcattcccacgtgtt

SEQ ID NO: 30695 - RNA, 21 nt, synthetic construct
  source 1..21: mol_type = other RNA; note = Description of Artificial Sequence: Synthetic oligonucleotide
tatcagtgcattcccacgttt

SEQ ID NO: 30696 - RNA, 21 nt, synthetic construct
  source 1..21: mol_type = other RNA; note = Description of Artificial Sequence: Synthetic oligonucleotide
taatcagtgcattcccacgtt

SEQ ID NO: 30697 - RNA, 21 nt, synthetic construct
  source 1..21: mol_type = other RNA; note = Description of Artificial Sequence: Synthetic oligonucleotide
taaatcagtgcattcccactt

SEQ ID NO: 30698 - RNA, 21 nt, synthetic construct
  source 1..21: mol_type = other RNA; note = Description of Artificial Sequence: Synthetic oligonucleotide
taaaatcagtgcattcccatt

SEQ ID NO: 30699 - RNA, 21 nt, synthetic construct
  source 1..21: mol_type = other RNA; note = Description of Artificial Sequence: Synthetic oligonucleotide
taaaaatcagtgcattccctt

SEQ ID NO: 30700 - RNA, 21 nt, synthetic construct
  source 1..21: mol_type = other RNA; note = Description of Artificial Sequence: Synthetic oligonucleotide
tgaaaaatcagtgcattcctt

SEQ ID NO: 30701 - RNA, 21 nt, synthetic construct
  source 1..21: mol_type = other RNA; note = Description of Artificial Sequence: Synthetic oligonucleotide
tggaaaaatcagtgcattctt

SEQ ID NO: 30702 - RNA, 21 nt, synthetic construct
  source 1..21: mol_type = other RNA; note = Description of Artificial Sequence: Synthetic oligonucleotide
taggaaaaatcagtgcatttt

SEQ ID NO: 30703 - RNA, 21 nt, synthetic construct
  source 1..21: mol_type = other RNA; note = Description of Artificial Sequence: Synthetic oligonucleotide
ttaggaaaaatcagtgcattt

SEQ ID NO: 30704 - RNA, 21 nt, synthetic construct
  source 1..21: mol_type = other RNA; note = Description of Artificial Sequence: Synthetic oligonucleotide
tctaggaaaaatcagtgcatt

SEQ ID NO: 30705 - RNA, 21 nt, synthetic construct
  source 1..21: mol_type = other RNA; note = Description of Artificial Sequence: Synthetic oligonucleotide
tcctaggaaaaatcagtgctt

SEQ ID NO: 30706 - RNA, 21 nt, synthetic construct
  source 1..21: mol_type = other RNA; note = Description of Artificial Sequence: Synthetic oligonucleotide
ttcctaggaaaaatcagtgtt

SEQ ID NO: 30707 - RNA, 21 nt, synthetic construct
  source 1..21: mol_type = other RNA; note = Description of Artificial Sequence: Synthetic oligonucleotide
tctcctaggaaaaatcagttt

SEQ ID NO: 30708 - RNA, 21 nt, synthetic construct
  source 1..21: mol_type = other RNA; note = Description of Artificial Sequence: Synthetic oligonucleotide
tactcctaggaaaaatcagtt

SEQ ID NO: 30709 - RNA, 21 nt, synthetic construct
  source 1..21: mol_type = other RNA; note = Description of Artificial Sequence: Synthetic oligonucleotide
ttactcctaggaaaaatcatt

SEQ ID NO: 30710 - RNA, 21 nt, synthetic construct
  source 1..21: mol_type = other RNA; note = Description of Artificial Sequence: Synthetic oligonucleotide
tctactcctaggaaaaatctt

SEQ ID NO: 30711 - RNA, 21 nt, synthetic construct
  source 1..21: mol_type = other RNA; note = Description of Artificial Sequence: Synthetic oligonucleotide
ttctactcctaggaaaaattt

SEQ ID NO: 30712 - RNA, 21 nt, synthetic construct
  source 1..21: mol_type = other RNA; note = Description of Artificial Sequence: Synthetic oligonucleotide
tgtctactcctaggaaaaatt

SEQ ID NO: 30713 - RNA, 21 nt, synthetic construct
  source 1..21: mol_type = other RNA; note = Description of Artificial Sequence: Synthetic oligonucleotide
ttgtctactcctaggaaaatt

SEQ ID NO: 30714 - RNA, 21 nt, synthetic construct
  source 1..21: mol_type = other RNA; note = Description of Artificial Sequence: Synthetic oligonucleotide
tatgtctactcctaggaaatt

SEQ ID NO: 30715 - RNA, 21 nt, synthetic construct
  source 1..21: mol_type = other RNA; note = Description of Artificial Sequence: Synthetic oligonucleotide
tcatgtctactcctaggaatt

SEQ ID NO: 30716 - RNA, 21 nt, synthetic construct
  source 1..21: mol_type = other RNA; note = Description of Artificial Sequence: Synthetic oligonucleotide
tacatgtctactcctaggatt

SEQ ID NO: 30717 - RNA, 21 nt, synthetic construct
  source 1..21: mol_type = other RNA; note = Description of Artificial Sequence: Synthetic oligonucleotide
taacatgtctactcctaggtt

SEQ ID NO: 30718 - RNA, 21 nt, synthetic construct
  source 1..21: mol_type = other RNA; note = Description of Artificial Sequence: Synthetic oligonucleotide
tgaacatgtctactcctagtt

SEQ ID NO: 30719 - RNA, 21 nt, synthetic construct
  source 1..21: mol_type = other RNA; note = Description of Artificial Sequence: Synthetic oligonucleotide
tggaacatgtctactcctatt

SEQ ID NO: 30720 - RNA, 21 nt, synthetic construct
  source 1..21: mol_type = other RNA; note = Description of Artificial Sequence: Synthetic oligonucleotide
taggaacatgtctactccttt

SEQ ID NO: 30721 - RNA, 21 nt, synthetic construct
  source 1..21: mol_type = other RNA; note = Description of Artificial Sequence: Synthetic oligonucleotide
tgaggaacatgtctactcctt

SEQ ID NO: 30722 - RNA, 21 nt, synthetic construct
  source 1..21: mol_type = other RNA; note = Description of Artificial Sequence: Synthetic oligonucleotide
tagaggaacatgtctactctt

SEQ ID NO: 30723 - RNA, 21 nt, synthetic construct
  source 1..21: mol_type = other RNA; note = Description of Artificial Sequence: Synthetic oligonucleotide
ttagaggaacatgtctacttt

SEQ ID NO: 30724 - RNA, 21 nt, synthetic construct
  source 1..21: mol_type = other RNA; note = Description of Artificial Sequence: Synthetic oligonucleotide
tttagaggaacatgtctactt

SEQ ID NO: 30725 - RNA, 21 nt, synthetic construct
  source 1..21: mol_type = other RNA; note = Description of Artificial Sequence: Synthetic oligonucleotide
tattagaggaacatgtctatt

SEQ ID NO: 30726 - RNA, 21 nt, synthetic construct
  source 1..21: mol_type = other RNA; note = Description of Artificial Sequence: Synthetic oligonucleotide
taattagaggaacatgtcttt

SEQ ID NO: 30727 - RNA, 21 nt, synthetic construct
  source 1..21: mol_type = other RNA; note = Description of Artificial Sequence: Synthetic oligonucleotide
ttaattagaggaacatgtctt

SEQ ID NO: 30728 - RNA, 21 nt, synthetic construct
  source 1..21: mol_type = other RNA; note = Description of Artificial Sequence: Synthetic oligonucleotide
tgtaattagaggaacatgttt

SEQ ID NO: 30729 - RNA, 21 nt, synthetic construct
  source 1..21: mol_type = other RNA; note = Description of Artificial Sequence: Synthetic oligonucleotide
tagtaattagaggaacatgtt

SEQ ID NO: 30730 - RNA, 21 nt, synthetic construct
  source 1..21: mol_type = other RNA; note = Description of Artificial Sequence: Synthetic oligonucleotide
tgagtaattagaggaacattt

SEQ ID NO: 30731 - RNA, 21 nt, synthetic construct
  source 1..21: mol_type = other RNA; note = Description of Artificial Sequence: Synthetic oligonucleotide
tggagtaattagaggaacatt

SEQ ID NO: 30732 - RNA, 21 nt, synthetic construct
  source 1..21: mol_type = other RNA; note = Description of Artificial Sequence: Synthetic oligonucleotide
tgggagtaattagaggaactt

SEQ ID NO: 30733 - RNA, 21 nt, synthetic construct
  source 1..21: mol_type = other RNA; note = Description of Artificial Sequence: Synthetic oligonucleotide
tagggagtaattagaggaatt

SEQ ID NO: 30734 - RNA, 21 nt, synthetic construct
  source 1..21: mol_type = other RNA; note = Description of Artificial Sequence: Synthetic oligonucleotide
tcagggagtaattagaggatt

SEQ ID NO: 30735 - RNA, 21 nt, synthetic construct
  source 1..21: mol_type = other RNA; note = Description of Artificial Sequence: Synthetic oligonucleotide
ttcagggagtaattagaggtt

SEQ ID NO: 30736 - RNA, 21 nt, synthetic construct
  source 1..21: mol_type = other RNA; note = Description of Artificial Sequence: Synthetic oligonucleotide
tctcagggagtaattagagtt

SEQ ID NO: 30737 - RNA, 21 nt, synthetic construct
  source 1..21: mol_type = other RNA; note = Description of Artificial Sequence: Synthetic oligonucleotide
tcctcagggagtaattagatt

SEQ ID NO: 30738 - RNA, 21 nt, synthetic construct
  source 1..21: mol_type = other RNA; note = Description of Artificial Sequence: Synthetic oligonucleotide
tccctcagggagtaattagtt

SEQ ID NO: 30739 - RNA, 21 nt, synthetic construct
  source 1..21: mol_type = other RNA; note = Description of Artificial Sequence: Synthetic oligonucleotide
taccctcagggagtaattatt

SEQ ID NO: 30740 - RNA, 21 nt, synthetic construct
  source 1..21: mol_type = other RNA; note = Description of Artificial Sequence: Synthetic oligonucleotide
taaccctcagggagtaatttt

SEQ ID NO: 30741 - RNA, 21 nt, synthetic construct
  source 1..21: mol_type = other RNA; note = Description of Artificial Sequence: Synthetic oligonucleotide
ttaaccctcagggagtaattt

SEQ ID NO: 30742 - RNA, 21 nt, synthetic construct
  source 1..21: mol_type = other RNA; note = Description of Artificial Sequence: Synthetic oligonucleotide
tctaaccctcagggagtaatt

SEQ ID NO: 30743 - RNA, 21 nt, synthetic construct
  source 1..21: mol_type = other RNA; note = Description of Artificial Sequence: Synthetic oligonucleotide
tactaaccctcagggagtatt

SEQ ID NO: 30744 - RNA, 21 nt, synthetic construct
  source 1..21: mol_type = other RNA; note = Description of Artificial Sequence: Synthetic oligonucleotide
taactaaccctcagggagttt

SEQ ID NO: 30745 - RNA, 21 nt, synthetic construct
  source 1..21: mol_type = other RNA; note = Description of Artificial Sequence: Synthetic oligonucleotide
tcaactaaccctcagggagtt

SEQ ID NO: 30746 - RNA, 21 nt, synthetic construct
  source 1..21: mol_type = other RNA; note = Description of Artificial Sequence: Synthetic oligonucleotide
tccaactaaccctcagggatt

SEQ ID NO: 30747 - RNA, 21 nt, synthetic construct
  source 1..21: mol_type = other RNA; note = Description of Artificial Sequence: Synthetic oligonucleotide
tcccaactaaccctcagggtt

SEQ ID NO: 30748 - RNA, 21 nt, synthetic construct
  source 1..21: mol_type = other RNA; note = Description of Artificial Sequence: Synthetic oligonucleotide
tccccaactaaccctcaggtt

SEQ ID NO: 30749 - RNA, 21 nt, synthetic construct
  source 1..21: mol_type = other RNA; note = Description of Artificial Sequence: Synthetic oligonucleotide
tgccccaactaaccctcagtt

SEQ ID NO: 30750 - RNA, 21 nt, synthetic construct
  source 1..21: mol_type = other RNA; note = Description of Artificial Sequence: Synthetic oligonucleotide
tagccccaactaaccctcatt

SEQ ID NO: 30751 - RNA, 21 nt, synthetic construct
  source 1..21: mol_type = other RNA; note = Description of Artificial Sequence: Synthetic oligonucleotide
ttagccccaactaaccctctt

SEQ ID NO: 30752 - RNA, 21 nt, synthetic construct
  source 1..21: mol_type = other RNA; note = Description of Artificial Sequence: Synthetic oligonucleotide
tttagccccaactaacccttt

SEQ ID NO: 30753 - RNA, 21 nt, synthetic construct
  source 1..21: mol_type = other RNA; note = Description of Artificial Sequence: Synthetic oligonucleotide
ttttagccccaactaaccctt

SEQ ID NO: 30754 - RNA, 21 nt, synthetic construct
  source 1..21: mol_type = other RNA; note = Description of Artificial Sequence: Synthetic oligonucleotide
tgtttagccccaactaacctt

SEQ ID NO: 30755 - RNA, 21 nt, synthetic construct
  source 1..21: mol_type = other RNA; note = Description of Artificial Sequence: Synthetic oligonucleotide
tggtttagccccaactaactt

SEQ ID NO: 30756 - RNA, 21 nt, synthetic construct
  source 1..21: mol_type = other RNA; note = Description of Artificial Sequence: Synthetic oligonucleotide
ttggtttagccccaactaatt

SEQ ID NO: 30757 - RNA, 21 nt, synthetic construct
  source 1..21: mol_type = other RNA; note = Description of Artificial Sequence: Synthetic oligonucleotide
tatggtttagccccaactatt

SEQ ID NO: 30758 - RNA, 21 nt, synthetic construct
  source 1..21: mol_type = other RNA; note = Description of Artificial Sequence: Synthetic oligonucleotide
tcatggtttagccccaacttt

SEQ ID NO: 30759 - RNA, 21 nt, synthetic construct
  source 1..21: mol_type = other RNA; note = Description of Artificial Sequence: Synthetic oligonucleotide
ttcatggtttagccccaactt

SEQ ID NO: 30760 - RNA, 21 nt, synthetic construct
  source 1..21: mol_type = other RNA; note = Description of Artificial Sequence: Synthetic oligonucleotide
tgtcatggtttagccccaatt

SEQ ID NO: 30761 - RNA, 21 nt, synthetic construct
  source 1..21: mol_type = other RNA; note = Description of Artificial Sequence: Synthetic oligonucleotide
ttgtcatggtttagccccatt

SEQ ID NO: 30762 - RNA, 21 nt, synthetic construct
  source 1..21: mol_type = other RNA; note = Description of Artificial Sequence: Synthetic oligonucleotide
tctgtcatggtttagcccctt

SEQ ID NO: 30763 - RNA, 21 nt, synthetic construct
  source 1..21: mol_type = other RNA; note = Description of Artificial Sequence: Synthetic oligonucleotide
ttctgtcatggtttagccctt

SEQ ID NO: 30764 - RNA, 21 nt, synthetic construct
  source 1..21: mol_type = other RNA; note = Description of Artificial Sequence: Synthetic oligonucleotide
tttctgtcatggtttagcctt

SEQ ID NO: 30765 - RNA, 21 nt, synthetic construct
  source 1..21: mol_type = other RNA; note = Description of Artificial Sequence: Synthetic oligonucleotide
tcttctgtcatggtttagctt

SEQ ID NO: 30766 - RNA, 21 nt, synthetic construct
  source 1..21: mol_type = other RNA; note = Description of Artificial Sequence: Synthetic oligonucleotide
tacttctgtcatggtttagtt

SEQ ID NO: 30767 - RNA, 21 nt, synthetic construct
  source 1..21: mol_type = other RNA; note = Description of Artificial Sequence: Synthetic oligonucleotide
tcacttctgtcatggtttatt

SEQ ID NO: 30768 - RNA, 21 nt, synthetic construct
  source 1..21: mol_type = other RNA; note = Description of Artificial Sequence: Synthetic oligonucleotide
tccacttctgtcatggttttt

SEQ ID NO: 30769 - RNA, 21 nt, synthetic construct
  source 1..21: mol_type = other RNA; note = Description of Artificial Sequence: Synthetic oligonucleotide
tcccacttctgtcatggtttt

SEQ ID NO: 30770 - RNA, 21 nt, synthetic construct
  source 1..21: mol_type = other RNA; note = Description of Artificial Sequence: Synthetic oligonucleotide
tccccacttctgtcatggttt

SEQ ID NO: 30771 - RNA, 21 nt, synthetic construct
  source 1..21: mol_type = other RNA; note = Description of Artificial Sequence: Synthetic oligonucleotide
ttccccacttctgtcatggtt

SEQ ID NO: 30772 - RNA, 21 nt, synthetic construct
  source 1..21: mol_type = other RNA; note = Description of Artificial Sequence: Synthetic oligonucleotide
tttccccacttctgtcatgtt

SEQ ID NO: 30773 - RNA, 21 nt, synthetic construct
  source 1..21: mol_type = other RNA; note = Description of Artificial Sequence: Synthetic oligonucleotide
tcttccccacttctgtcattt

SEQ ID NO: 30774 - RNA, 21 nt, synthetic construct
  source 1..21: mol_type = other RNA; note = Description of Artificial Sequence: Synthetic oligonucleotide
tacttccccacttctgtcatt

SEQ ID NO: 30775 - RNA, 21 nt, synthetic construct
  source 1..21: mol_type = other RNA; note = Description of Artificial Sequence: Synthetic oligonucleotide
taacttccccacttctgtctt

SEQ ID NO: 30776 - RNA, 21 nt, synthetic construct
  source 1..21: mol_type = other RNA; note = Description of Artificial Sequence: Synthetic oligonucleotide
tgaacttccccacttctgttt

SEQ ID NO: 30777 - RNA, 21 nt, synthetic construct
  source 1..21: mol_type = other RNA; note = Description of Artificial Sequence: Synthetic oligonucleotide
ttgaacttccccacttctgtt

SEQ ID NO: 30778 - RNA, 21 nt, synthetic construct
  source 1..21: mol_type = other RNA; note = Description of Artificial Sequence: Synthetic oligonucleotide
tttgaacttccccacttcttt

SEQ ID NO: 30779 - RNA, 21 nt, synthetic construct
  source 1..21: mol_type = other RNA; note = Description of Artificial Sequence: Synthetic oligonucleotide
tattgaacttccccacttctt

SEQ ID NO: 30780 - RNA, 21 nt, synthetic construct
  source 1..21: mol_type = other RNA; note = Description of Artificial Sequence: Synthetic oligonucleotide
tcattgaacttccccactttt

SEQ ID NO: 30781 - RNA, 21 nt, synthetic construct
  source 1..21: mol_type = other RNA; note = Description of Artificial Sequence: Synthetic oligonucleotide
tacattgaacttccccacttt

SEQ ID NO: 30782 - RNA, 21 nt, synthetic construct
  source 1..21: mol_type = other RNA; note = Description of Artificial Sequence: Synthetic oligonucleotide
tgacattgaacttccccactt

SEQ ID NO: 30783 - RNA, 21 nt, synthetic construct
  source 1..21: mol_type = other RNA; note = Description of Artificial Sequence: Synthetic oligonucleotide
tggacattgaacttccccatt

SEQ ID NO: 30784 - RNA, 21 nt, synthetic construct
  source 1..21: mol_type = other RNA; note = Description of Artificial Sequence: Synthetic oligonucleotide
taggacattgaacttcccctt

SEQ ID NO: 30785 - RNA, 21 nt, synthetic construct
  source 1..21: mol_type = other RNA; note = Description of Artificial Sequence: Synthetic oligonucleotide
taaggacattgaacttccctt

SEQ ID NO: 30786 - RNA, 21 nt, synthetic construct
  source 1..21: mol_type = other RNA; note = Description of Artificial Sequence: Synthetic oligonucleotide
ttaaggacattgaacttcctt

SEQ ID NO: 30787 - RNA, 21 nt, synthetic construct
  source 1..21: mol_type = other RNA; note = Description of Artificial Sequence: Synthetic oligonucleotide
tttaaggacattgaacttctt

SEQ ID NO: 30788 - RNA, 21 nt, synthetic construct
  source 1..21: mol_type = other RNA; note = Description of Artificial Sequence: Synthetic oligonucleotide
ttttaaggacattgaactttt

SEQ ID NO: 30789 - RNA, 21 nt, synthetic construct
  source 1..21: mol_type = other RNA; note = Description of Artificial Sequence: Synthetic oligonucleotide
tatttaaggacattgaacttt

SEQ ID NO: 30790 - RNA, 21 nt, synthetic construct
  source 1..21: mol_type = other RNA; note = Description of Artificial Sequence: Synthetic oligonucleotide
tgatttaaggacattgaactt

SEQ ID NO: 30791 - RNA, 21 nt, synthetic construct
  source 1..21: mol_type = other RNA; note = Description of Artificial Sequence: Synthetic oligonucleotide
tggatttaaggacattgaatt

SEQ ID NO: 30792 - RNA, 21 nt, synthetic construct
  source 1..21: mol_type = other RNA; note = Description of Artificial Sequence: Synthetic oligonucleotide
ttggatttaaggacattgatt

SEQ ID NO: 30793 - RNA, 21 nt, synthetic construct
  source 1..21: mol_type = other RNA; note = Description of Artificial Sequence: Synthetic oligonucleotide
tatggatttaaggacattgtt

SEQ ID NO: 30794 - RNA, 21 nt, synthetic construct
  source 1..21: mol_type = other RNA; note = Description of Artificial Sequence: Synthetic oligonucleotide
tgatggatttaaggacatttt

SEQ ID NO: 30795 - RNA, 21 nt, synthetic construct
  source 1..21: mol_type = other RNA; note = Description of Artificial Sequence: Synthetic oligonucleotide
tagatggatttaaggacattt

SEQ ID NO: 30796 - RNA, 21 nt, synthetic construct
  source 1..21: mol_type = other RNA; note = Description of Artificial Sequence: Synthetic oligonucleotide
taagatggatttaaggacatt

SEQ ID NO: 30797 - RNA, 21 nt, synthetic construct
  source 1..21: mol_type = other RNA; note = Description of Artificial Sequence: Synthetic oligonucleotide
ttaagatggatttaaggactt

SEQ ID NO: 30798 - RNA, 21 nt, synthetic construct
  source 1..21: mol_type = other RNA; note = Description of Artificial Sequence: Synthetic oligonucleotide
tgtaagatggatttaaggatt

SEQ ID NO: 30799 - RNA, 21 nt, synthetic construct
  source 1..21: mol_type = other RNA; note = Description of Artificial Sequence: Synthetic oligonucleotide
tagtaagatggatttaaggtt

SEQ ID NO: 30800 - RNA, 21 nt, synthetic construct
  source 1..21: mol_type = other RNA; note = Description of Artificial Sequence: Synthetic oligonucleotide
taagtaagatggatttaagtt

SEQ ID NO: 30801 - RNA, 21 nt, synthetic construct
  source 1..21: mol_type = other RNA; note = Description of Artificial Sequence: Synthetic oligonucleotide
tcaagtaagatggatttaatt

SEQ ID NO: 30802 - RNA, 21 nt, synthetic construct
  source 1..21: mol_type = other RNA; note = Description of Artificial Sequence: Synthetic oligonucleotide
tgcaagtaagatggatttatt

SEQ ID NO: 30803 - RNA, 21 nt, synthetic construct
  source 1..21: mol_type = other RNA; note = Description of Artificial Sequence: Synthetic oligonucleotide
tggcaagtaagatggattttt

SEQ ID NO: 30804 - RNA, 21 nt, synthetic construct
  source 1..21: mol_type = other RNA; note = Description of Artificial Sequence: Synthetic oligonucleotide
ttggcaagtaagatggatttt

SEQ ID NO: 30805 - RNA, 21 nt, synthetic construct
  source 1..21: mol_type = other RNA; note = Description of Artificial Sequence: Synthetic oligonucleotide
tttggcaagtaagatggattt

SEQ ID NO: 30806 - RNA, 21 nt, synthetic construct
  source 1..21: mol_type = other RNA; note = Description of Artificial Sequence: Synthetic oligonucleotide
tgttggcaagtaagatggatt

SEQ ID NO: 30807 - RNA, 21 nt, synthetic construct
  source 1..21: mol_type = other RNA; note = Description of Artificial Sequence: Synthetic oligonucleotide
ttgttggcaagtaagatggtt

SEQ ID NO: 30808 - RNA, 21 nt, synthetic construct
  source 1..21: mol_type = other RNA; note = Description of Artificial Sequence: Synthetic oligonucleotide
tctgttggcaagtaagatgtt

SEQ ID NO: 30809 - RNA, 21 nt, synthetic construct
  source 1..21: mol_type = other RNA; note = Description of Artificial Sequence: Synthetic oligonucleotide
tcctgttggcaagtaagattt

SEQ ID NO: 30810 - RNA, 21 nt, synthetic construct
  source 1..21: mol_type = other RNA; note = Description of Artificial Sequence: Synthetic oligonucleotide
tacctgttggcaagtaagatt

SEQ ID NO: 30811 - RNA, 21 nt, synthetic construct
  source 1..21: mol_type = other RNA; note = Description of Artificial Sequence: Synthetic oligonucleotide
ttacctgttggcaagtaagtt

SEQ ID NO: 30812 - RNA, 21 nt, synthetic construct
  source 1..21: mol_type = other RNA; note = Description of Artificial Sequence: Synthetic oligonucleotide
tttacctgttggcaagtaatt

SEQ ID NO: 30813 - RNA, 21 nt, synthetic construct
  source 1..21: mol_type = other RNA; note = Description of Artificial Sequence: Synthetic oligonucleotide
tcttacctgttggcaagtatt

SEQ ID NO: 30814 - RNA, 21 nt, synthetic construct
  source 1..21: mol_type = other RNA; note = Description of Artificial Sequence: Synthetic oligonucleotide
ttcttacctgttggcaagttt

SEQ ID NO: 30815 - RNA, 21 nt, synthetic construct
  source 1..21: mol_type = other RNA; note = Description of Artificial Sequence: Synthetic oligonucleotide
tctcttacctgttggcaagtt

SEQ ID NO: 30816 - RNA, 21 nt, synthetic construct
  source 1..21: mol_type = other RNA; note = Description of Artificial Sequence: Synthetic oligonucleotide
tcctcttacctgttggcaatt

SEQ ID NO: 30817 - RNA, 21 nt, synthetic construct
  source 1..21: mol_type = other RNA; note = Description of Artificial Sequence: Synthetic oligonucleotide
ttcctcttacctgttggcatt

SEQ ID NO: 30818 - RNA, 21 nt, synthetic construct
  source 1..21: mol_type = other RNA; note = Description of Artificial Sequence: Synthetic oligonucleotide
tttcctcttacctgttggctt

SEQ ID NO: 30819 - RNA, 21 nt, synthetic construct
  source 1..21: mol_type = other RNA; note = Description of Artificial Sequence: Synthetic oligonucleotide
tcttcctcttacctgttggtt

SEQ ID NO: 30820 - RNA, 21 nt, synthetic construct
  source 1..21: mol_type = other RNA; note = Description of Artificial Sequence: Synthetic oligonucleotide
tgcttcctcttacctgttgtt

SEQ ID NO: 30821 - RNA, 21 nt, synthetic construct
  source 1..21: mol_type = other RNA; note = Description of Artificial Sequence: Synthetic oligonucleotide
tagcttcctcttacctgtttt

SEQ ID NO: 30822 - RNA, 21 nt, synthetic construct
  source 1..21: mol_type = other RNA; note = Description of Artificial Sequence: Synthetic oligonucleotide
taagcttcctcttacctgttt

SEQ ID NO: 30823 - RNA, 21 nt, synthetic construct
  source 1..21: mol_type = other RNA; note = Description of Artificial Sequence: Synthetic oligonucleotide
ttaagcttcctcttacctgtt

SEQ ID NO: 30824 - RNA, 21 nt, synthetic construct
  source 1..21: mol_type = other RNA; note = Description of Artificial Sequence: Synthetic oligonucleotide
tgtaagcttcctcttaccttt

SEQ ID NO: 30825 - RNA, 21 nt, synthetic construct
  source 1..21: mol_type = other RNA; note = Description of Artificial Sequence: Synthetic oligonucleotide
ttgtaagcttcctcttacctt

SEQ ID NO: 30826 - RNA, 21 nt, synthetic construct
  source 1..21: mol_type = other RNA; note = Description of Artificial Sequence: Synthetic oligonucleotide
tatgtaagcttcctcttactt

SEQ ID NO: 30827 - RNA, 21 nt, synthetic construct
  source 1..21: mol_type = other RNA; note = Description of Artificial Sequence: Synthetic oligonucleotide
taatgtaagcttcctcttatt

SEQ ID NO: 30828 - RNA, 21 nt, synthetic construct
  source 1..21: mol_type = other RNA; note = Description of Artificial Sequence: Synthetic oligonucleotide
ttaatgtaagcttcctctttt

SEQ ID NO: 30829 - RNA, 21 nt, synthetic construct
  source 1..21: mol_type = other RNA; note = Description of Artificial Sequence: Synthetic oligonucleotide
tgtaatgtaagcttcctcttt

SEQ ID NO: 30830 - RNA, 21 nt, synthetic construct
  source 1..21: mol_type = other RNA; note = Description of Artificial Sequence: Synthetic oligonucleotide
ttgtaatgtaagcttcctctt

SEQ ID NO: 30831 - RNA, 21 nt, synthetic construct
  source 1..21: mol_type = other RNA; note = Description of Artificial Sequence: Synthetic oligonucleotide
tatgtaatgtaagcttccttt

SEQ ID NO: 30832 - RNA, 21 nt, synthetic construct
  source 1..21: mol_type = other RNA; note = Description of Artificial Sequence: Synthetic oligonucleotide
tcatgtaatgtaagcttcctt

SEQ ID NO: 30833 - RNA, 21 nt, synthetic construct
  source 1..21: mol_type = other RNA; note = Description of Artificial Sequence: Synthetic oligonucleotide
tacatgtaatgtaagcttctt

SEQ ID NO: 30834 - RNA, 21 nt, synthetic construct
  source 1..21: mol_type = other RNA; note = Description of Artificial Sequence: Synthetic oligonucleotide
tgacatgtaatgtaagctttt

SEQ ID NO: 30835 - RNA, 21 nt, synthetic construct
  source 1..21: mol_type = other RNA; note = Description of Artificial Sequence: Synthetic oligonucleotide
tggacatgtaatgtaagcttt

SEQ ID NO: 30836 - RNA, 21 nt, synthetic construct
  source 1..21: mol_type = other RNA; note = Description of Artificial Sequence: Synthetic oligonucleotide
ttggacatgtaatgtaagctt

SEQ ID NO: 30837 - RNA, 21 nt, synthetic construct
  source 1..21: mol_type = other RNA; note = Description of Artificial Sequence: Synthetic oligonucleotide
tctggacatgtaatgtaagtt

SEQ ID NO: 30838 - RNA, 21 nt, synthetic construct
  source 1..21: mol_type = other RNA; note = Description of Artificial Sequence: Synthetic oligonucleotide
tactggacatgtaatgtaatt

SEQ ID NO: 30839 - RNA, 21 nt, synthetic construct
  source 1..21: mol_type = other RNA; note = Description of Artificial Sequence: Synthetic oligonucleotide
tgactggacatgtaatgtatt

SEQ ID NO: 30840 - RNA, 21 nt, synthetic construct
  source 1..21: mol_type = other RNA; note = Description of Artificial Sequence: Synthetic oligonucleotide
tggactggacatgtaatgttt

SEQ ID NO: 30841 - RNA, 21 nt, synthetic construct
  source 1..21: mol_type = other RNA; note = Description of Artificial Sequence: Synthetic oligonucleotide
ttggactggacatgtaatgtt

SEQ ID NO: 30842 - RNA, 21 nt, synthetic construct
  source 1..21: mol_type = other RNA; note = Description of Artificial Sequence: Synthetic oligonucleotide
tgtggactggacatgtaattt

SEQ ID NO: 30843 - RNA, 21 nt, synthetic construct
  source 1..21: mol_type = other RNA; note = Description of Artificial Sequence: Synthetic oligonucleotide
ttgtggactggacatgtaatt

SEQ ID NO: 30844 - RNA, 21 nt, synthetic construct
  source 1..21: mol_type = other RNA; note = Description of Artificial Sequence: Synthetic oligonucleotide
tatgtggactggacatgtatt

SEQ ID NO: 30845 - RNA, 21 nt, synthetic construct
  source 1..21: mol_type = other RNA; note = Description of Artificial Sequence: Synthetic oligonucleotide
taatgtggactggacatgttt

SEQ ID NO: 30846 - RNA, 21 nt, synthetic construct
  source 1..21: mol_type = other RNA; note = Description of Artificial Sequence: Synthetic oligonucleotide
taaatgtggactggacatgtt

SEQ ID NO: 30847 - RNA, 21 nt, synthetic construct
  source 1..21: mol_type = other RNA; note = Description of Artificial Sequence: Synthetic oligonucleotide
ttaaatgtggactggacattt

SEQ ID NO: 30848 - RNA, 21 nt, synthetic construct
  source 1..21: mol_type = other RNA; note = Description of Artificial Sequence: Synthetic oligonucleotide
tttaaatgtggactggacatt

SEQ ID NO: 30849 - RNA, 21 nt, synthetic construct
  source 1..21: mol_type = other RNA; note = Description of Artificial Sequence: Synthetic oligonucleotide
ttttaaatgtggactggactt

SEQ ID NO: 30850 - RNA, 21 nt, synthetic construct
  source 1..21: mol_type = other RNA; note = Description of Artificial Sequence: Synthetic oligonucleotide
tctttaaatgtggactggatt

SEQ ID NO: 30851 - RNA, 21 nt, synthetic construct
  source 1..21: mol_type = other RNA; note = Description of Artificial Sequence: Synthetic oligonucleotide
ttctttaaatgtggactggtt

SEQ ID NO: 30852 - RNA, 21 nt, synthetic construct
  source 1..21: mol_type = other RNA; note = Description of Artificial Sequence: Synthetic oligonucleotide
tctctttaaatgtggactgtt

SEQ ID NO: 30853 - RNA, 21 nt, synthetic construct
  source 1..21: mol_type = other RNA; note = Description of Artificial Sequence: Synthetic oligonucleotide
tgctctttaaatgtggacttt

SEQ ID NO: 30854 - RNA, 21 nt, synthetic construct
  source 1..21: mol_type = other RNA; note = Description of Artificial Sequence: Synthetic oligonucleotide
ttgctctttaaatgtggactt

SEQ ID NO: 30855 - RNA, 21 nt, synthetic construct
  source 1..21: mol_type = other RNA; note = Description of Artificial Sequence: Synthetic oligonucleotide
tgtgctctttaaatgtggatt

SEQ ID NO: 30856 - RNA, 21 nt, synthetic construct
  source 1..21: mol_type = other RNA; note = Description of Artificial Sequence: Synthetic oligonucleotide
tagtgctctttaaatgtggtt

SEQ ID NO: 30857 - RNA, 21 nt, synthetic construct
  source 1..21: mol_type = other RNA; note = Description of Artificial Sequence: Synthetic oligonucleotide
taagtgctctttaaatgtgtt

SEQ ID NO: 30858 - RNA, 21 nt, synthetic construct
  source 1..21: mol_type = other RNA; note = Description of Artificial Sequence: Synthetic oligonucleotide
ttaagtgctctttaaatgttt

SEQ ID NO: 30859 - RNA, 21 nt, synthetic construct
  source 1..21: mol_type = other RNA; note = Description of Artificial Sequence: Synthetic oligonucleotide
tgtaagtgctctttaaatgtt

SEQ ID NO: 30860 - RNA, 21 nt, synthetic construct
  source 1..21: mol_type = other RNA; note = Description of Artificial Sequence: Synthetic oligonucleotide
tagtaagtgctctttaaattt

SEQ ID NO: 30861 - RNA, 21 nt, synthetic construct
  source 1..21: mol_type = other RNA; note = Description of Artificial Sequence: Synthetic oligonucleotide
tcagtaagtgctctttaaatt

SEQ ID NO: 30862 - RNA, 21 nt, synthetic construct
  source 1..21: mol_type = other RNA; note = Description of Artificial Sequence: Synthetic oligonucleotide
tacagtaagtgctctttaatt

SEQ ID NO: 30863 - RNA, 21 nt, synthetic construct
  source 1..21: mol_type = other RNA; note = Description of Artificial Sequence: Synthetic oligonucleotide
tcacagtaagtgctctttatt

SEQ ID NO: 30864 - RNA, 21 nt, synthetic construct
  source 1..21: mol_type = other RNA; note = Description of Artificial Sequence: Synthetic oligonucleotide
tccacagtaagtgctcttttt

SEQ ID NO: 30865 - RNA, 21 nt, synthetic construct
  source 1..21: mol_type = other RNA; note = Description of Artificial Sequence: Synthetic oligonucleotide
ttccacagtaagtgctctttt

SEQ ID NO: 30866 - RNA, 21 nt, synthetic construct
  source 1..21: mol_type = other RNA; note = Description of Artificial Sequence: Synthetic oligonucleotide
tttccacagtaagtgctcttt

SEQ ID NO: 30867 - RNA, 21 nt, synthetic construct
  source 1..21: mol_type = other RNA; note = Description of Artificial Sequence: Synthetic oligonucleotide
tgttccacagtaagtgctctt

SEQ ID NO: 30868 - RNA, 21 nt, synthetic construct
  source 1..21: mol_type = other RNA; note = Description of Artificial Sequence: Synthetic oligonucleotide
ttgttccacagtaagtgcttt

SEQ ID NO: 30869 - RNA, 21 nt, synthetic construct
  source 1..21: mol_type = other RNA; note = Description of Artificial Sequence: Synthetic oligonucleotide
tttgttccacagtaagtgctt

SEQ ID NO: 30870 - RNA, 21 nt, synthetic construct
  source 1..21: mol_type = other RNA; note = Description of Artificial Sequence: Synthetic oligonucleotide
tcttgttccacagtaagtgtt

SEQ ID NO: 30871 - RNA, 21 nt, synthetic construct
  source 1..21: mol_type = other RNA; note = Description of Artificial Sequence: Synthetic oligonucleotide
tgcttgttccacagtaagttt

SEQ ID NO: 30872 - RNA, 21 nt, synthetic construct
  source 1..21: mol_type = other RNA; note = Description of Artificial Sequence: Synthetic oligonucleotide
tggcttgttccacagtaagtt

SEQ ID NO: 30873 - RNA, 21 nt, synthetic construct
  source 1..21: mol_type = other RNA; note = Description of Artificial Sequence: Synthetic oligonucleotide
taggcttgttccacagtaatt

SEQ ID NO: 30874 - RNA, 21 nt, synthetic construct
  source 1..21: mol_type = other RNA; note = Description of Artificial Sequence: Synthetic oligonucleotide
taaggcttgttccacagtatt

SEQ ID NO: 30875 - RNA, 21 nt, synthetic construct
  source 1..21: mol_type = other RNA; note = Description of Artificial Sequence: Synthetic oligonucleotide
tgaaggcttgttccacagttt

SEQ ID NO: 30876 - RNA, 21 nt, synthetic construct
  source 1..21: mol_type = other RNA; note = Description of Artificial Sequence: Synthetic oligonucleotide
ttgaaggcttgttccacagtt

SEQ ID NO: 30877 - RNA, 21 nt, synthetic construct
  source 1..21: mol_type = other RNA; note = Description of Artificial Sequence: Synthetic oligonucleotide
tctgaaggcttgttccacatt

SEQ ID NO: 30878 - RNA, 21 nt, synthetic construct
  source 1..21: mol_type = other RNA; note = Description of Artificial Sequence: Synthetic oligonucleotide
tgctgaaggcttgttccactt

SEQ ID NO: 30879 - RNA, 21 nt, synthetic construct
  source 1..21: mol_type = other RNA; note = Description of Artificial Sequence: Synthetic oligonucleotide
tggctgaaggcttgttccatt

SEQ ID NO: 30880 - RNA, 21 nt, synthetic construct
  source 1..21: mol_type = other RNA; note = Description of Artificial Sequence: Synthetic oligonucleotide
ttggctgaaggcttgttcctt

SEQ ID NO: 30881 - RNA, 21 nt, synthetic construct
  source 1..21: mol_type = other RNA; note = Description of Artificial Sequence: Synthetic oligonucleotide
tttggctgaaggcttgttctt

SEQ ID NO: 30882 - RNA, 21 nt, synthetic construct
  source 1..21: mol_type = other RNA; note = Description of Artificial Sequence: Synthetic oligonucleotide
ttttggctgaaggcttgtttt

SEQ ID NO: 30883 - RNA, 21 nt, synthetic construct
  source 1..21: mol_type = other RNA; note = Description of Artificial Sequence: Synthetic oligonucleotide
tgtttggctgaaggcttgttt

SEQ ID NO: 30884 - RNA, 21 nt, synthetic construct
  source 1..21: mol_type = other RNA; note = Description of Artificial Sequence: Synthetic oligonucleotide
ttgtttggctgaaggcttgtt

SEQ ID NO: 30885 - RNA, 21 nt, synthetic construct
  source 1..21: mol_type = other RNA; note = Description of Artificial Sequence: Synthetic oligonucleotide
tttgtttggctgaaggctttt

SEQ ID NO: 30886 - RNA, 21 nt, synthetic construct
  source 1..21: mol_type = other RNA; note = Description of Artificial Sequence: Synthetic oligonucleotide
tattgtttggctgaaggcttt

SEQ ID NO: 30887 - RNA, 21 nt, synthetic construct
  source 1..21: mol_type = other RNA; note = Description of Artificial Sequence: Synthetic oligonucleotide
tcattgtttggctgaaggctt

SEQ ID NO: 30888 - RNA, 21 nt, synthetic construct
  source 1..21: mol_type = other RNA; note = Description of Artificial Sequence: Synthetic oligonucleotide
tccattgtttggctgaaggtt

SEQ ID NO: 30889 - RNA, 21 nt, synthetic construct
  source 1..21: mol_type = other RNA; note = Description of Artificial Sequence: Synthetic oligonucleotide
tcccattgtttggctgaagtt

SEQ ID NO: 30890 - RNA, 21 nt, synthetic construct
  source 1..21: mol_type = other RNA; note = Description of Artificial Sequence: Synthetic oligonucleotide
tccccattgtttggctgaatt

SEQ ID NO: 30891 - RNA, 21 nt, synthetic construct
  source 1..21: mol_type = other RNA; note = Description of Artificial Sequence: Synthetic oligonucleotide
ttccccattgtttggctgatt

SEQ ID NO: 30892 - RNA, 21 nt, synthetic construct
  source 1..21: mol_type = other RNA; note = Description of Artificial Sequence: Synthetic oligonucleotide
tatccccattgtttggctgtt

SEQ ID NO: 30893 - RNA, 21 nt, synthetic construct
  source 1..21: mol_type = other RNA; note = Description of Artificial Sequence: Synthetic oligonucleotide
ttatccccattgtttggcttt

SEQ ID NO: 30894 - RNA, 21 nt, synthetic construct
  source 1..21: mol_type = other RNA; note = Description of Artificial Sequence: Synthetic oligonucleotide
tctatccccattgtttggctt

SEQ ID NO: 30895 - RNA, 21 nt, synthetic construct
  source 1..21: mol_type = other RNA; note = Description of Artificial Sequence: Synthetic oligonucleotide
ttctatccccattgtttggtt

SEQ ID NO: 30896 - RNA, 21 nt, synthetic construct
  source 1..21: mol_type = other RNA; note = Description of Artificial Sequence: Synthetic oligonucleotide
tttctatccccattgtttgtt

SEQ ID NO: 30897 - RNA, 21 nt, synthetic construct
  source 1..21: mol_type = other RNA; note = Description of Artificial Sequence: Synthetic oligonucleotide
ttttctatccccattgttttt

SEQ ID NO: 30898 - RNA, 21 nt, synthetic construct
  source 1..21: mol_type = other RNA; note = Description of Artificial Sequence: Synthetic oligonucleotide
tttttctatccccattgtttt

SEQ ID NO: 30899 - RNA, 21 nt, synthetic construct
  source 1..21: mol_type = other RNA; note = Description of Artificial Sequence: Synthetic oligonucleotide
tcttttctatccccattgttt

SEQ ID NO: 30900 - RNA, 21 nt, synthetic construct
  source 1..21: mol_type = other RNA; note = Description of Artificial Sequence: Synthetic oligonucleotide
tacttttctatccccattgtt

SEQ ID NO: 30901 - RNA, 21 nt, synthetic construct
  source 1..21: mol_type = other RNA; note = Description of Artificial Sequence: Synthetic oligonucleotide
ttacttttctatccccatttt

SEQ ID NO: 30902 - RNA, 21 nt, synthetic construct
  source 1..21: mol_type = other RNA; note = Description of Artificial Sequence: Synthetic oligonucleotide
tctacttttctatccccattt

SEQ ID NO: 30903 - RNA, 21 nt, synthetic construct
  source 1..21: mol_type = other RNA; note = Description of Artificial Sequence: Synthetic oligonucleotide
tcctacttttctatccccatt

SEQ ID NO: 30904 - RNA, 21 nt, synthetic construct
  source 1..21: mol_type = other RNA; note = Description of Artificial Sequence: Synthetic oligonucleotide
tacctacttttctatcccctt

SEQ ID NO: 30905 - RNA, 21 nt, synthetic construct
  source 1..21: mol_type = other RNA; note = Description of Artificial Sequence: Synthetic oligonucleotide
ttacctacttttctatccctt

SEQ ID NO: 30906 - RNA, 21 nt, synthetic construct
  source 1..21: mol_type = other RNA; note = Description of Artificial Sequence: Synthetic oligonucleotide
tttacctacttttctatcctt

SEQ ID NO: 30907 - RNA, 21 nt, synthetic construct
  source 1..21: mol_type = other RNA; note = Description of Artificial Sequence: Synthetic oligonucleotide
tcttacctacttttctatctt

SEQ ID NO: 30908 - RNA, 21 nt, synthetic construct
  source 1..21: mol_type = other RNA; note = Description of Artificial Sequence: Synthetic oligonucleotide
ttcttacctacttttctattt

SEQ ID NO: 30909 - RNA, 21 nt, synthetic construct
  source 1..21: mol_type = other RNA; note = Description of Artificial Sequence: Synthetic oligonucleotide
tgtcttacctacttttctatt

SEQ ID NO: 30910 - RNA, 21 nt, synthetic construct
  source 1..21: mol_type = other RNA; note = Description of Artificial Sequence: Synthetic oligonucleotide
tagtcttacctacttttcttt

SEQ ID NO: 30911 - RNA, 21 nt, synthetic construct
  source 1..21: mol_type = other RNA; note = Description of Artificial Sequence: Synthetic oligonucleotide
tgagtcttacctacttttctt

SEQ ID NO: 30912 - RNA, 21 nt, synthetic construct
  source 1..21: mol_type = other RNA; note = Description of Artificial Sequence: Synthetic oligonucleotide
ttgagtcttacctactttttt

SEQ ID NO: 30913 - RNA, 21 nt, synthetic construct
  source 1..21: mol_type = other RNA; note = Description of Artificial Sequence: Synthetic oligonucleotide
tctgagtcttacctacttttt

SEQ ID NO: 30914 - RNA, 21 nt, synthetic construct
  source 1..21: mol_type = other RNA; note = Description of Artificial Sequence: Synthetic oligonucleotide
tgctgagtcttacctactttt

SEQ ID NO: 30915 - RNA, 21 nt, synthetic construct
  source 1..21: mol_type = other RNA; note = Description of Artificial Sequence: Synthetic oligonucleotide
tggctgagtcttacctacttt

SEQ ID NO: 30916 - RNA, 21 nt, synthetic construct
  source 1..21: mol_type = other RNA; note = Description of Artificial Sequence: Synthetic oligonucleotide
taggctgagtcttacctactt

SEQ ID NO: 30917 - RNA, 21 nt, synthetic construct
  source 1..21: mol_type = other RNA; note = Description of Artificial Sequence: Synthetic oligonucleotide
taaggctgagtcttacctatt

SEQ ID NO: 30918 - RNA, 21 nt, synthetic construct
  source 1..21: mol_type = other RNA; note = Description of Artificial Sequence: Synthetic oligonucleotide
taaaggctgagtcttaccttt

SEQ ID NO: 30919 - RNA, 21 nt, synthetic construct
  source 1..21: mol_type = other RNA; note = Description of Artificial Sequence: Synthetic oligonucleotide
tcaaaggctgagtcttacctt

SEQ ID NO: 30920 - RNA, 21 nt, synthetic construct
  source 1..21: mol_type = other RNA; note = Description of Artificial Sequence: Synthetic oligonucleotide
tacaaaggctgagtcttactt

SEQ ID NO: 30921 - RNA, 21 nt, synthetic construct
  source 1..21: mol_type = other RNA; note = Description of Artificial Sequence: Synthetic oligonucleotide
tgacaaaggctgagtcttatt

SEQ ID NO: 30922 - RNA, 21 nt, synthetic construct
  source 1..21: mol_type = other RNA; note = Description of Artificial Sequence: Synthetic oligonucleotide
tggacaaaggctgagtctttt

SEQ ID NO: 30923 - RNA, 21 nt, synthetic construct
  source 1..21: mol_type = other RNA; note = Description of Artificial Sequence: Synthetic oligonucleotide
ttggacaaaggctgagtcttt

SEQ ID NO: 30924 - RNA, 21 nt, synthetic construct
  source 1..21: mol_type = other RNA; note = Description of Artificial Sequence: Synthetic oligonucleotide
tctggacaaaggctgagtctt

SEQ ID NO: 30925 - RNA, 21 nt, synthetic construct
  source 1..21: mol_type = other RNA; note = Description of Artificial Sequence: Synthetic oligonucleotide
ttctggacaaaggctgagttt

SEQ ID NO: 30926 - RNA, 21 nt, synthetic construct
  source 1..21: mol_type = other RNA; note = Description of Artificial Sequence: Synthetic oligonucleotide
tctctggacaaaggctgagtt

SEQ ID NO: 30927 - RNA, 21 nt, synthetic construct
  source 1..21: mol_type = other RNA; note = Description of Artificial Sequence: Synthetic oligonucleotide
ttctctggacaaaggctgatt

SEQ ID NO: 30928 - RNA, 21 nt, synthetic construct
  source 1..21: mol_type = other RNA; note = Description of Artificial Sequence: Synthetic oligonucleotide
tttctctggacaaaggctgtt

SEQ ID NO: 30929 - RNA, 21 nt, synthetic construct
  source 1..21: mol_type = other RNA; note = Description of Artificial Sequence: Synthetic oligonucleotide
tcttctctggacaaaggcttt

SEQ ID NO: 30930 - RNA, 21 nt, synthetic construct
  source 1..21: mol_type = other RNA; note = Description of Artificial Sequence: Synthetic oligonucleotide
tgcttctctggacaaaggctt

SEQ ID NO: 30931 - RNA, 21 nt, synthetic construct
  source 1..21: mol_type = other RNA; note = Description of Artificial Sequence: Synthetic oligonucleotide
tagcttctctggacaaaggtt

SEQ ID NO: 30932 - RNA, 21 nt, synthetic construct
  source 1..21: mol_type = other RNA; note = Description of Artificial Sequence: Synthetic oligonucleotide
tgagcttctctggacaaagtt

SEQ ID NO: 30933 - RNA, 21 nt, synthetic construct
  source 1..21: mol_type = other RNA; note = Description of Artificial Sequence: Synthetic oligonucleotide
ttgagcttctctggacaaatt

SEQ ID NO: 30934 - RNA, 21 nt, synthetic construct
  source 1..21: mol_type = other RNA; note = Description of Artificial Sequence: Synthetic oligonucleotide
tctgagcttctctggacaatt

SEQ ID NO: 30935 - RNA, 21 nt, synthetic construct
  source 1..21: mol_type = other RNA; note = Description of Artificial Sequence: Synthetic oligonucleotide
tcctgagcttctctggacatt

SEQ ID NO: 30936 - RNA, 21 nt, synthetic construct
  source 1..21: mol_type = other RNA; note = Description of Artificial Sequence: Synthetic oligonucleotide
tccctgagcttctctggactt

SEQ ID NO: 30937 - RNA, 21 nt, synthetic construct
  source 1..21: mol_type = other RNA; note = Description of Artificial Sequence: Synthetic oligonucleotide
taccctgagcttctctggatt

SEQ ID NO: 30938 - RNA, 21 nt, synthetic construct
  source 1..21: mol_type = other RNA; note = Description of Artificial Sequence: Synthetic oligonucleotide
ttaccctgagcttctctggtt

SEQ ID NO: 30939 - RNA, 21 nt, synthetic construct
  source 1..21: mol_type = other RNA; note = Description of Artificial Sequence: Synthetic oligonucleotide
tataccctgagcttctctgtt

SEQ ID NO: 30940 - RNA, 21 nt, synthetic construct
  source 1..21: mol_type = other RNA; note = Description of Artificial Sequence: Synthetic oligonucleotide
ttataccctgagcttctcttt

SEQ ID NO: 30941 - RNA, 21 nt, synthetic construct
  source 1..21: mol_type = other RNA; note = Description of Artificial Sequence: Synthetic oligonucleotide
tctataccctgagcttctctt

SEQ ID NO: 30942 - RNA, 21 nt, synthetic construct
  source 1..21: mol_type = other RNA; note = Description of Artificial Sequence: Synthetic oligonucleotide
tgctataccctgagcttcttt

SEQ ID NO: 30943 - RNA, 21 nt, synthetic construct
  source 1..21: mol_type = other RNA; note = Description of Artificial Sequence: Synthetic oligonucleotide
tagctataccctgagcttctt

SEQ ID NO: 30944 - RNA, 21 nt, synthetic construct
  source 1..21: mol_type = other RNA; note = Description of Artificial Sequence: Synthetic oligonucleotide
tcagctataccctgagctttt

SEQ ID NO: 30945 - RNA, 21 nt, synthetic construct
  source 1..21: mol_type = other RNA; note = Description of Artificial Sequence: Synthetic oligonucleotide
ttcagctataccctgagcttt

SEQ ID NO: 30946 - RNA, 21 nt, synthetic construct
  source 1..21: mol_type = other RNA; note = Description of Artificial Sequence: Synthetic oligonucleotide
tttcagctataccctgagctt

SEQ ID NO: 30947 - RNA, 21 nt, synthetic construct
  source 1..21: mol_type = other RNA; note = Description of Artificial Sequence: Synthetic oligonucleotide
tattcagctataccctgagtt

SEQ ID NO: 30948 - RNA, 21 nt, synthetic construct
  source 1..21: mol_type = other RNA; note = Description of Artificial Sequence: Synthetic oligonucleotide
ttattcagctataccctgatt

SEQ ID NO: 30949 - RNA, 21 nt, synthetic construct
  source 1..21: mol_type = other RNA; note = Description of Artificial Sequence: Synthetic oligonucleotide
tctattcagctataccctgtt

SEQ ID NO: 30950 - RNA, 21 nt, synthetic construct
  source 1..21: mol_type = other RNA; note = Description of Artificial Sequence: Synthetic oligonucleotide
tcctattcagctatacccttt

SEQ ID NO: 30951 - RNA, 21 nt, synthetic construct
  source 1..21: mol_type = other RNA; note = Description of Artificial Sequence: Synthetic oligonucleotide
tgcctattcagctataccctt

SEQ ID NO: 30952 - RNA, 21 nt, synthetic construct
  source 1..21: mol_type = other RNA; note = Description of Artificial Sequence: Synthetic oligonucleotide
ttgcctattcagctatacctt

SEQ ID NO: 30953 - RNA, 21 nt, synthetic construct
  source 1..21: mol_type = other RNA; note = Description of Artificial Sequence: Synthetic oligonucleotide
tctgcctattcagctatactt

SEQ ID NO: 30954 - RNA, 21 nt, synthetic construct
  source 1..21: mol_type = other RNA; note = Description of Artificial Sequence: Synthetic oligonucleotide
tactgcctattcagctatatt

SEQ ID NO: 30955 - RNA, 21 nt, synthetic construct
  source 1..21: mol_type = other RNA; note = Description of Artificial Sequence: Synthetic oligonucleotide
taactgcctattcagctattt

SEQ ID NO: 30956 - RNA, 21 nt, synthetic construct
  source 1..21: mol_type = other RNA; note = Description of Artificial Sequence: Synthetic oligonucleotide
taaactgcctattcagctatt

SEQ ID NO: 30957 - RNA, 21 nt, synthetic construct
  source 1..21: mol_type = other RNA; note = Description of Artificial Sequence: Synthetic oligonucleotide
tgaaactgcctattcagcttt

SEQ ID NO: 30958 - RNA, 21 nt, synthetic construct
  source 1..21: mol_type = other RNA; note = Description of Artificial Sequence: Synthetic oligonucleotide
tagaaactgcctattcagctt

SEQ ID NO: 30959 - RNA, 21 nt, synthetic construct
  source 1..21: mol_type = other RNA; note = Description of Artificial Sequence: Synthetic oligonucleotide
taagaaactgcctattcagtt

SEQ ID NO: 30960 - RNA, 21 nt, synthetic construct
  source 1..21: mol_type = other RNA; note = Description of Artificial Sequence: Synthetic oligonucleotide
taaagaaactgcctattcatt

SEQ ID NO: 30961 - RNA, 21 nt, synthetic construct
  source 1..21: mol_type = other RNA; note = Description of Artificial Sequence: Synthetic oligonucleotide
taaaagaaactgcctattctt

SEQ ID NO: 30962 - RNA, 21 nt, synthetic construct
  source 1..21: mol_type = other RNA; note = Description of Artificial Sequence: Synthetic oligonucleotide
tcaaaagaaactgcctatttt

SEQ ID NO: 30963 - RNA, 21 nt, synthetic construct
  source 1..21: mol_type = other RNA; note = Description of Artificial Sequence: Synthetic oligonucleotide
tacaaaagaaactgcctattt

SEQ ID NO: 30964 - RNA, 21 nt, synthetic construct
  source 1..21: mol_type = other RNA; note = Description of Artificial Sequence: Synthetic oligonucleotide
tgacaaaagaaactgcctatt

SEQ ID NO: 30965 - RNA, 21 nt, synthetic construct
  source 1..21: mol_type = other RNA; note = Description of Artificial Sequence: Synthetic oligonucleotide
tggacaaaagaaactgccttt

SEQ ID NO: 30966 - RNA, 21 nt, synthetic construct
  source 1..21: mol_type = other RNA; note = Description of Artificial Sequence: Synthetic oligonucleotide
taggacaaaagaaactgcctt

SEQ ID NO: 30967 - RNA, 21 nt, synthetic construct
  source 1..21: mol_type = other RNA; note = Description of Artificial Sequence: Synthetic oligonucleotide
tcaggacaaaagaaactgctt

SEQ ID NO: 30968 - RNA, 21 nt, synthetic construct
  source 1..21: mol_type = other RNA; note = Description of Artificial Sequence: Synthetic oligonucleotide
ttcaggacaaaagaaactgtt

SEQ ID NO: 30969 - RNA, 21 nt, synthetic construct
  source 1..21: mol_type = other RNA; note = Description of Artificial Sequence: Synthetic oligonucleotide
tctcaggacaaaagaaacttt

SEQ ID NO: 30970 - RNA, 21 nt, synthetic construct
  source 1..21: mol_type = other RNA; note = Description of Artificial Sequence: Synthetic oligonucleotide
tcctcaggacaaaagaaactt

SEQ ID NO: 30971 - RNA, 21 nt, synthetic construct
  source 1..21: mol_type = other RNA; note = Description of Artificial Sequence: Synthetic oligonucleotide
ttcctcaggacaaaagaaatt

SEQ ID NO: 30972 - RNA, 21 nt, synthetic construct
  source 1..21: mol_type = other RNA; note = Description of Artificial Sequence: Synthetic oligonucleotide
tttcctcaggacaaaagaatt

SEQ ID NO: 30973 - RNA, 21 nt, synthetic construct
  source 1..21: mol_type = other RNA; note = Description of Artificial Sequence: Synthetic oligonucleotide
ttttcctcaggacaaaagatt

SEQ ID NO: 30974 - RNA, 21 nt, synthetic construct
  source 1..21: mol_type = other RNA; note = Description of Artificial Sequence: Synthetic oligonucleotide
tttttcctcaggacaaaagtt

SEQ ID NO: 30975 - RNA, 21 nt, synthetic construct
  source 1..21: mol_type = other RNA; note = Description of Artificial Sequence: Synthetic oligonucleotide
tattttcctcaggacaaaatt

SEQ ID NO: 30976 - RNA, 21 nt, synthetic construct
  source 1..21: mol_type = other RNA; note = Description of Artificial Sequence: Synthetic oligonucleotide
tgattttcctcaggacaaatt

SEQ ID NO: 30977 - RNA, 21 nt, synthetic construct
  source 1..21: mol_type = other RNA; note = Description of Artificial Sequence: Synthetic oligonucleotide
ttgattttcctcaggacaatt

SEQ ID NO: 30978 - RNA, 21 nt, synthetic construct
  source 1..21: mol_type = other RNA; note = Description of Artificial Sequence: Synthetic oligonucleotide
tctgattttcctcaggacatt

SEQ ID NO: 30979 - RNA, 21 nt, synthetic construct
  source 1..21: mol_type = other RNA; note = Description of Artificial Sequence: Synthetic oligonucleotide
tcctgattttcctcaggactt

SEQ ID NO: 30980 - RNA, 21 nt, synthetic construct
  source 1..21: mol_type = other RNA; note = Description of Artificial Sequence: Synthetic oligonucleotide
ttcctgattttcctcaggatt

SEQ ID NO: 30981 - RNA, 21 nt, synthetic construct
  source 1..21: mol_type = other RNA; note = Description of Artificial Sequence: Synthetic oligonucleotide
tgtcctgattttcctcaggtt

SEQ ID NO: 30982 - RNA, 21 nt, synthetic construct
  source 1..21: mol_type = other RNA; note = Description of Artificial Sequence: Synthetic oligonucleotide
ttgtcctgattttcctcagtt

SEQ ID NO: 30983 - RNA, 21 nt, synthetic construct
  source 1..21: mol_type = other RNA; note = Description of Artificial Sequence: Synthetic oligonucleotide
tatgtcctgattttcctcatt

SEQ ID NO: 30984 - RNA, 21 nt, synthetic construct
  source 1..21: mol_type = other RNA; note = Description of Artificial Sequence: Synthetic oligonucleotide
tcatgtcctgattttcctctt

SEQ ID NO: 30985 - RNA, 21 nt, synthetic construct
  source 1..21: mol_type = other RNA; note = Description of Artificial Sequence: Synthetic oligonucleotide
tgcatgtcctgattttccttt

SEQ ID NO: 30986 - RNA, 21 nt, synthetic construct
  source 1..21: mol_type = other RNA; note = Description of Artificial Sequence: Synthetic oligonucleotide
tggcatgtcctgattttcctt

SEQ ID NO: 30987 - RNA, 21 nt, synthetic construct
  source 1..21: mol_type = other RNA; note = Description of Artificial Sequence: Synthetic oligonucleotide
taggcatgtcctgattttctt

SEQ ID NO: 30988 - RNA, 21 nt, synthetic construct
  source 1..21: mol_type = other RNA; note = Description of Artificial Sequence: Synthetic oligonucleotide
tcaggcatgtcctgatttttt

SEQ ID NO: 30989 - RNA, 21 nt, synthetic construct
  source 1..21: mol_type = other RNA; note = Description of Artificial Sequence: Synthetic oligonucleotide
tgcaggcatgtcctgattttt

SEQ ID NO: 30990 - RNA, 21 nt, synthetic construct
  source 1..21: mol_type = other RNA; note = Description of Artificial Sequence: Synthetic oligonucleotide
tagcaggcatgtcctgatttt

SEQ ID NO: 30991 - RNA, 21 nt, synthetic construct
  source 1..21: mol_type = other RNA; note = Description of Artificial Sequence: Synthetic oligonucleotide
taagcaggcatgtcctgattt

SEQ ID NO: 30992 - RNA, 21 nt, synthetic construct
  source 1..21: mol_type = other RNA; note = Description of Artificial Sequence: Synthetic oligonucleotide
taaagcaggcatgtcctgatt

SEQ ID NO: 30993 - RNA, 21 nt, synthetic construct
  source 1..21: mol_type = other RNA; note = Description of Artificial Sequence: Synthetic oligonucleotide
tgaaagcaggcatgtcctgtt

SEQ ID NO: 30994 - RNA, 21 nt, synthetic construct
  source 1..21: mol_type = other RNA; note = Description of Artificial Sequence: Synthetic oligonucleotide
tagaaagcaggcatgtccttt

SEQ ID NO: 30995 - RNA, 21 nt, synthetic construct
  source 1..21: mol_type = other RNA; note = Description of Artificial Sequence: Synthetic oligonucleotide
ttagaaagcaggcatgtcctt

SEQ ID NO: 30996 - RNA, 21 nt, synthetic construct
  source 1..21: mol_type = other RNA; note = Description of Artificial Sequence: Synthetic oligonucleotide
tttagaaagcaggcatgtctt

SEQ ID NO: 30997 - RNA, 21 nt, synthetic construct
  source 1..21: mol_type = other RNA; note = Description of Artificial Sequence: Synthetic oligonucleotide
ttttagaaagcaggcatgttt

SEQ ID NO: 30998 - RNA, 21 nt, synthetic construct
  source 1..21: mol_type = other RNA; note = Description of Artificial Sequence: Synthetic oligonucleotide
tttttagaaagcaggcatgtt

SEQ ID NO: 30999 - RNA, 21 nt, synthetic construct
  source 1..21: mol_type = other RNA; note = Description of Artificial Sequence: Synthetic oligonucleotide
ttttttagaaagcaggcattt

SEQ ID NO: 31000 - RNA, 21 nt, synthetic construct
  source 1..21: mol_type = other RNA; note = Description of Artificial Sequence: Synthetic oligonucleotide
tatttttagaaagcaggcatt

SEQ ID NO: 31001 - RNA, 21 nt, synthetic construct
  source 1..21: mol_type = other RNA; note = Description of Artificial Sequence: Synthetic oligonucleotide
tgatttttagaaagcaggctt

SEQ ID NO: 31002 - RNA, 21 nt, synthetic construct
  source 1..21: mol_type = other RNA; note = Description of Artificial Sequence: Synthetic oligonucleotide
tagatttttagaaagcaggtt

SEQ ID NO: 31003 - RNA, 21 nt, synthetic construct
  source 1..21: mol_type = other RNA; note = Description of Artificial Sequence: Synthetic oligonucleotide
taagatttttagaaagcagtt

SEQ ID NO: 31004 - RNA, 21 nt, synthetic construct
  source 1..21: mol_type = other RNA; note = Description of Artificial Sequence: Synthetic oligonucleotide
tgaagatttttagaaagcatt

SEQ ID NO: 31005 - RNA, 21 nt, synthetic construct
  source 1..21: mol_type = other RNA; note = Description of Artificial Sequence: Synthetic oligonucleotide
tggaagatttttagaaagctt

SEQ ID NO: 31006 - RNA, 21 nt, synthetic construct
  source 1..21: mol_type = other RNA; note = Description of Artificial Sequence: Synthetic oligonucleotide
taggaagatttttagaaagtt

SEQ ID NO: 31007 - RNA, 21 nt, synthetic construct
  source 1..21: mol_type = other RNA; note = Description of Artificial Sequence: Synthetic oligonucleotide
tgaggaagatttttagaaatt

SEQ ID NO: 31008 - RNA, 21 nt, synthetic construct
  source 1..21: mol_type = other RNA; note = Description of Artificial Sequence: Synthetic oligonucleotide
tagaggaagatttttagaatt

SEQ ID NO: 31009 - RNA, 21 nt, synthetic construct
  source 1..21: mol_type = other RNA; note = Description of Artificial Sequence: Synthetic oligonucleotide
tcagaggaagatttttagatt

SEQ ID NO: 31010 - RNA, 21 nt, synthetic construct
  source 1..21: mol_type = other RNA; note = Description of Artificial Sequence: Synthetic oligonucleotide
ttcagaggaagatttttagtt

SEQ ID NO: 31011 - RNA, 21 nt, synthetic construct
  source 1..21: mol_type = other RNA; note = Description of Artificial Sequence: Synthetic oligonucleotide
tttcagaggaagatttttatt

SEQ ID NO: 31012 - RNA, 21 nt, synthetic construct
  source 1..21: mol_type = other RNA; note = Description of Artificial Sequence: Synthetic oligonucleotide
tcttcagaggaagattttttt

SEQ ID NO: 31013 - RNA, 21 nt, synthetic construct
  source 1..21: mol_type = other RNA; note = Description of Artificial Sequence: Synthetic oligonucleotide
ttcttcagaggaagatttttt

SEQ ID NO: 31014 - RNA, 21 nt, synthetic construct
  source 1..21: mol_type = other RNA; note = Description of Artificial Sequence: Synthetic oligonucleotide
tgtcttcagaggaagattttt

SEQ ID NO: 31015 - RNA, 21 nt, synthetic construct
  source 1..21: mol_type = other RNA; note = Description of Artificial Sequence: Synthetic oligonucleotide
tggtcttcagaggaagatttt

SEQ ID NO: 31016 - RNA, 21 nt, synthetic construct
  source 1..21: mol_type = other RNA; note = Description of Artificial Sequence: Synthetic oligonucleotide
taggtcttcagaggaagattt

SEQ ID NO: 31017 - RNA, 21 nt, synthetic construct
  source 1..21: mol_type = other RNA; note = Description of Artificial Sequence: Synthetic oligonucleotide
tcaggtcttcagaggaagatt

SEQ ID NO: 31018 - RNA, 21 nt, synthetic construct
  source 1..21: mol_type = other RNA; note = Description of Artificial Sequence: Synthetic oligonucleotide
ttcaggtcttcagaggaagtt

SEQ ID NO: 31019 - RNA, 21 nt, synthetic construct
  source 1..21: mol_type = other RNA; note = Description of Artificial Sequence: Synthetic oligonucleotide
tgtcaggtcttcagaggaatt

SEQ ID NO: 31020 - RNA, 21 nt, synthetic construct
  source 1..21: mol_type = other RNA; note = Description of Artificial Sequence: Synthetic oligonucleotide
tggtcaggtcttcagaggatt

SEQ ID NO: 31021 - RNA, 21 nt, synthetic construct
  source 1..21: mol_type = other RNA; note = Description of Artificial Sequence: Synthetic oligonucleotide
tgggtcaggtcttcagaggtt

SEQ ID NO: 31022 - RNA, 21 nt, synthetic construct
  source 1..21: mol_type = other RNA; note = Description of Artificial Sequence: Synthetic oligonucleotide
ttgggtcaggtcttcagagtt

SEQ ID NO: 31023 - RNA, 21 nt, synthetic construct
  source 1..21: mol_type = other RNA; note = Description of Artificial Sequence: Synthetic oligonucleotide
tttgggtcaggtcttcagatt

SEQ ID NO: 31024 - RNA, 21 nt, synthetic construct
  source 1..21: mol_type = other RNA; note = Description of Artificial Sequence: Synthetic oligonucleotide
tcttgggtcaggtcttcagtt

SEQ ID NO: 31025 - RNA, 21 nt, synthetic construct
  source 1..21: mol_type = other RNA; note = Description of Artificial Sequence: Synthetic oligonucleotide
tgcttgggtcaggtcttcatt

SEQ ID NO: 31026 - RNA, 21 nt, synthetic construct
  source 1..21: mol_type = other RNA; note = Description of Artificial Sequence: Synthetic oligonucleotide
tagcttgggtcaggtcttctt

SEQ ID NO: 31027 - RNA, 21 nt, synthetic construct
  source 1..21: mol_type = other RNA; note = Description of Artificial Sequence: Synthetic oligonucleotide
tgagcttgggtcaggtctttt

SEQ ID NO: 31028 - RNA, 21 nt, synthetic construct
  source 1..21: mol_type = other RNA; note = Description of Artificial Sequence: Synthetic oligonucleotide
tagagcttgggtcaggtcttt

SEQ ID NO: 31029 - RNA, 21 nt, synthetic construct
  source 1..21: mol_type = other RNA; note = Description of Artificial Sequence: Synthetic oligonucleotide
taagagcttgggtcaggtctt

SEQ ID NO: 31030 - RNA, 21 nt, synthetic construct
  source 1..21: mol_type = other RNA; note = Description of Artificial Sequence: Synthetic oligonucleotide
ttaagagcttgggtcaggttt

SEQ ID NO: 31031 - RNA, 21 nt, synthetic construct
  source 1..21: mol_type = other RNA; note = Description of Artificial Sequence: Synthetic oligonucleotide
tttaagagcttgggtcaggtt

SEQ ID NO: 31032 - RNA, 21 nt, synthetic construct
  source 1..21: mol_type = other RNA; note = Description of Artificial Sequence: Synthetic oligonucleotide
ttttaagagcttgggtcagtt

SEQ ID NO: 31033 - RNA, 21 nt, synthetic construct
  source 1..21: mol_type = other RNA; note = Description of Artificial Sequence: Synthetic oligonucleotide
tatttaagagcttgggtcatt

SEQ ID NO: 31034 - RNA, 21 nt, synthetic construct
  source 1..21: mol_type = other RNA; note = Description of Artificial Sequence: Synthetic oligonucleotide
tcatttaagagcttgggtctt

SEQ ID NO: 31035 - RNA, 21 nt, synthetic construct
  source 1..21: mol_type = other RNA; note = Description of Artificial Sequence: Synthetic oligonucleotide
tgcatttaagagcttgggttt

SEQ ID NO: 31036 - RNA, 21 nt, synthetic construct
  source 1..21: mol_type = other RNA; note = Description of Artificial Sequence: Synthetic oligonucleotide
tagcatttaagagcttgggtt

SEQ ID NO: 31037 - RNA, 21 nt, synthetic construct
  source 1..21: mol_type = other RNA; note = Description of Artificial Sequence: Synthetic oligonucleotide
ttagcatttaagagcttggtt

SEQ ID NO: 31038 - RNA, 21 nt, synthetic construct
  source 1..21: mol_type = other RNA; note = Description of Artificial Sequence: Synthetic oligonucleotide
tatagcatttaagagcttgtt

SEQ ID NO: 31039 - RNA, 21 nt, synthetic construct
  source 1..21: mol_type = other RNA; note = Description of Artificial Sequence: Synthetic oligonucleotide
taatagcatttaagagctttt

SEQ ID NO: 31040 - RNA, 21 nt, synthetic construct
  source 1..21: mol_type = other RNA; note = Description of Artificial Sequence: Synthetic oligonucleotide
tcaatagcatttaagagcttt

SEQ ID NO: 31041 - RNA, 21 nt, synthetic construct
  source 1..21: mol_type = other RNA; note = Description of Artificial Sequence: Synthetic oligonucleotide
tacaatagcatttaagagctt

SEQ ID NO: 31042 - RNA, 21 nt, synthetic construct
  source 1..21: mol_type = other RNA; note = Description of Artificial Sequence: Synthetic oligonucleotide
ttacaatagcatttaagagtt

SEQ ID NO: 31043 - RNA, 21 nt, synthetic construct
  source 1..21: mol_type = other RNA; note = Description of Artificial Sequence: Synthetic oligonucleotide
tttacaatagcatttaagatt

SEQ ID NO: 31044 - RNA, 21 nt, synthetic construct
  source 1..21: mol_type = other RNA; note = Description of Artificial Sequence: Synthetic oligonucleotide
tcttacaatagcatttaagtt

SEQ ID NO: 31045 - RNA, 21 nt, synthetic construct
  source 1..21: mol_type = other RNA; note = Description of Artificial Sequence: Synthetic oligonucleotide
ttcttacaatagcatttaatt

SEQ ID NO: 31046 - RNA, 21 nt, synthetic construct
  source 1..21: mol_type = other RNA; note = Description of Artificial Sequence: Synthetic oligonucleotide
tctcttacaatagcatttatt

SEQ ID NO: 31047 - RNA, 21 nt, synthetic construct
  source 1..21: mol_type = other RNA; note = Description of Artificial Sequence: Synthetic oligonucleotide
ttctcttacaatagcattttt

SEQ ID NO: 31048 - RNA, 21 nt, synthetic construct
  source 1..21: mol_type = other RNA; note = Description of Artificial Sequence: Synthetic oligonucleotide
tttctcttacaatagcatttt

SEQ ID NO: 31049 - RNA, 21 nt, synthetic construct
  source 1..21: mol_type = other RNA; note = Description of Artificial Sequence: Synthetic oligonucleotide
ttttctcttacaatagcattt

SEQ ID NO: 31050 - RNA, 21 nt, synthetic construct
  source 1..21: mol_type = other RNA; note = Description of Artificial Sequence: Synthetic oligonucleotide
tatttctcttacaatagcatt

SEQ ID NO: 31051 - RNA, 21 nt, synthetic construct
  source 1..21: mol_type = other RNA; note = Description of Artificial Sequence: Synthetic oligonucleotide
taatttctcttacaatagctt

SEQ ID NO: 31052 - RNA, 21 nt, synthetic construct
  source 1..21: mol_type = other RNA; note = Description of Artificial Sequence: Synthetic oligonucleotide
taaatttctcttacaatagtt

SEQ ID NO: 31053 - RNA, 21 nt, synthetic construct
  source 1..21: mol_type = other RNA; note = Description of Artificial Sequence: Synthetic oligonucleotide
tgaaatttctcttacaatatt

SEQ ID NO: 31054 - RNA, 21 nt, synthetic construct
  source 1..21: mol_type = other RNA; note = Description of Artificial Sequence: Synthetic oligonucleotide
tagaaatttctcttacaattt

SEQ ID NO: 31055 - RNA, 21 nt, synthetic construct
  source 1..21: mol_type = other RNA; note = Description of Artificial Sequence: Synthetic oligonucleotide
taagaaatttctcttacaatt

SEQ ID NO: 31056 - RNA, 21 nt, synthetic construct
  source 1..21: mol_type = other RNA; note = Description of Artificial Sequence: Synthetic oligonucleotide
taaagaaatttctcttacatt

SEQ ID NO: 31057 - RNA, 21 nt, synthetic construct
  source 1..21: mol_type = other RNA; note = Description of Artificial Sequence: Synthetic oligonucleotide
tcaaagaaatttctcttactt

SEQ ID NO: 31058 - RNA, 21 nt, synthetic construct
  source 1..21: mol_type = other RNA; note = Description of Artificial Sequence: Synthetic oligonucleotide
tacaaagaaatttctcttatt

SEQ ID NO: 31059 - RNA, 21 nt, synthetic construct
  source 1..21: mol_type = other RNA; note = Description of Artificial Sequence: Synthetic oligonucleotide
tgacaaagaaatttctctttt

SEQ ID NO: 31060 - RNA, 21 nt, synthetic construct
  source 1..21: mol_type = other RNA; note = Description of Artificial Sequence: Synthetic oligonucleotide
tagacaaagaaatttctcttt

SEQ ID NO: 31061 - RNA, 21 nt, synthetic construct
  source 1..21: mol_type = other RNA; note = Description of Artificial Sequence: Synthetic oligonucleotide
ttagacaaagaaatttctctt

SEQ ID NO: 31062 - RNA, 21 nt, synthetic construct
  source 1..21: mol_type = other RNA; note = Description of Artificial Sequence: Synthetic oligonucleotide
tatagacaaagaaatttcttt

SEQ ID NO: 31063 - RNA, 21 nt, synthetic construct
  source 1..21: mol_type = other RNA; note = Description of Artificial Sequence: Synthetic oligonucleotide
taatagacaaagaaatttctt

SEQ ID NO: 31064 - RNA, 21 nt, synthetic construct
  source 1..21: mol_type = other RNA; note = Description of Artificial Sequence: Synthetic oligonucleotide
ttaatagacaaagaaattttt

SEQ ID NO: 31065 - RNA, 21 nt, synthetic construct
  source 1..21: mol_type = other RNA; note = Description of Artificial Sequence: Synthetic oligonucleotide
tttaatagacaaagaaatttt

SEQ ID NO: 31066 - RNA, 21 nt, synthetic construct
  source 1..21: mol_type = other RNA; note = Description of Artificial Sequence: Synthetic oligonucleotide
tgttaatagacaaagaaattt

SEQ ID NO: 31067 - RNA, 21 nt, synthetic construct
  source 1..21: mol_type = other RNA; note = Description of Artificial Sequence: Synthetic oligonucleotide
tagttaatagacaaagaaatt

SEQ ID NO: 31068 - RNA, 21 nt, synthetic construct
  source 1..21: mol_type = other RNA; note = Description of Artificial Sequence: Synthetic oligonucleotide
tgagttaatagacaaagaatt

SEQ ID NO: 31069 - RNA, 21 nt, synthetic construct
  source 1..21: mol_type = other RNA; note = Description of Artificial Sequence: Synthetic oligonucleotide
tggagttaatagacaaagatt

SEQ ID NO: 31070 - RNA, 21 nt, synthetic construct
  source 1..21: mol_type = other RNA; note = Description of Artificial Sequence: Synthetic oligonucleotide
ttggagttaatagacaaagtt

SEQ ID NO: 31071 - RNA, 21 nt, synthetic construct
  source 1..21: mol_type = other RNA; note = Description of Artificial Sequence: Synthetic oligonucleotide
tatggagttaatagacaaatt

SEQ ID NO: 31072 - RNA, 21 nt, synthetic construct
  source 1..21: mol_type = other RNA; note = Description of Artificial Sequence: Synthetic oligonucleotide
taatggagttaatagacaatt

SEQ ID NO: 31073 - RNA, 21 nt, synthetic construct
  source 1..21: mol_type = other RNA; note = Description of Artificial Sequence: Synthetic oligonucleotide
taaatggagttaatagacatt

SEQ ID NO: 31074 - RNA, 21 nt, synthetic construct
  source 1..21: mol_type = other RNA; note = Description of Artificial Sequence: Synthetic oligonucleotide
taaaatggagttaatagactt

SEQ ID NO: 31075 - RNA, 21 nt, synthetic construct
  source 1..21: mol_type = other RNA; note = Description of Artificial Sequence: Synthetic oligonucleotide
ttaaaatggagttaatagatt

SEQ ID NO: 31076 - RNA, 21 nt, synthetic construct
  source 1..21: mol_type = other RNA; note = Description of Artificial Sequence: Synthetic oligonucleotide
tctaaaatggagttaatagtt

SEQ ID NO: 31077 - RNA, 21 nt, synthetic construct
  source 1..21: mol_type = other RNA; note = Description of Artificial Sequence: Synthetic oligonucleotide
tactaaaatggagttaatatt

SEQ ID NO: 31078 - RNA, 21 nt, synthetic construct
  source 1..21: mol_type = other RNA; note = Description of Artificial Sequence: Synthetic oligonucleotide
ttactaaaatggagttaattt

SEQ ID NO: 31079 - RNA, 21 nt, synthetic construct
  source 1..21: mol_type = other RNA; note = Description of Artificial Sequence: Synthetic oligonucleotide
tctactaaaatggagttaatt

SEQ ID NO: 31080 - RNA, 21 nt, synthetic construct
  source 1..21: mol_type = other RNA; note = Description of Artificial Sequence: Synthetic oligonucleotide
tcctactaaaatggagttatt

SEQ ID NO: 31081 - RNA, 21 nt, synthetic construct
  source 1..21: mol_type = other RNA; note = Description of Artificial Sequence: Synthetic oligonucleotide
tccctactaaaatggagtttt

SEQ ID NO: 31082 - RNA, 21 nt, synthetic construct
  source 1..21: mol_type = other RNA; note = Description of Artificial Sequence: Synthetic oligonucleotide
ttccctactaaaatggagttt

SEQ ID NO: 31083 - RNA, 21 nt, synthetic construct
  source 1..21: mol_type = other RNA; note = Description of Artificial Sequence: Synthetic oligonucleotide
tatccctactaaaatggagtt

SEQ ID NO: 31084 - RNA, 21 nt, synthetic construct
  source 1..21: mol_type = other RNA; note = Description of Artificial Sequence: Synthetic oligonucleotide
taatccctactaaaatggatt

SEQ ID NO: 31085 - RNA, 21 nt, synthetic construct
  source 1..21: mol_type = other RNA; note = Description of Artificial Sequence: Synthetic oligonucleotide
tgaatccctactaaaatggtt

SEQ ID NO: 31086 - RNA, 21 nt, synthetic construct
  source 1..21: mol_type = other RNA; note = Description of Artificial Sequence: Synthetic oligonucleotide
ttgaatccctactaaaatgtt

SEQ ID NO: 31087 - RNA, 21 nt, synthetic construct
  source 1..21: mol_type = other RNA; note = Description of Artificial Sequence: Synthetic oligonucleotide
tgtgaatccctactaaaattt

SEQ ID NO: 31088 - RNA, 21 nt, synthetic construct
  source 1..21: mol_type = other RNA; note = Description of Artificial Sequence: Synthetic oligonucleotide
tagtgaatccctactaaaatt

SEQ ID NO: 31089 - RNA, 21 nt, synthetic construct
  source 1..21: mol_type = other RNA; note = Description of Artificial Sequence: Synthetic oligonucleotide
tcagtgaatccctactaaatt

SEQ ID NO: 31090 - RNA, 21 nt, synthetic construct
  source 1..21: mol_type = other RNA; note = Description of Artificial Sequence: Synthetic oligonucleotide
ttcagtgaatccctactaatt

SEQ ID NO: 31091 - RNA, 21 nt, synthetic construct
  source 1..21: mol_type = other RNA; note = Description of Artificial Sequence: Synthetic oligonucleotide
tgtcagtgaatccctactatt

SEQ ID NO: 31092 - RNA, 21 nt, synthetic construct
  source 1..21: mol_type = other RNA; note = Description of Artificial Sequence: Synthetic oligonucleotide
tagtcagtgaatccctacttt

SEQ ID NO: 31093 - RNA, 21 nt, synthetic construct
  source 1..21: mol_type = other RNA; note = Description of Artificial Sequence: Synthetic oligonucleotide
ttagtcagtgaatccctactt

SEQ ID NO: 31094 - RNA, 21 nt, synthetic construct
  source 1..21: mol_type = other RNA; note = Description of Artificial Sequence: Synthetic oligonucleotide
tctagtcagtgaatccctatt

SEQ ID NO: 31095 - RNA, 21 nt, synthetic construct
  source 1..21: mol_type = other RNA; note = Description of Artificial Sequence: Synthetic oligonucleotide
ttctagtcagtgaatcccttt

SEQ ID NO: 31096 - RNA, 21 nt, synthetic construct
  source 1..21: mol_type = other RNA; note = Description of Artificial Sequence: Synthetic oligonucleotide
tatctagtcagtgaatccctt

SEQ ID NO: 31097 - RNA, 21 nt, synthetic construct
  source 1..21: mol_type = other RNA; note = Description of Artificial Sequence: Synthetic oligonucleotide
taatctagtcagtgaatcctt

SEQ ID NO: 31098 - RNA, 21 nt, synthetic construct
  source 1..21: mol_type = other RNA; note = Description of Artificial Sequence: Synthetic oligonucleotide
taaatctagtcagtgaatctt

SEQ ID NO: 31099 - RNA, 21 nt, synthetic construct
  source 1..21: mol_type = other RNA; note = Description of Artificial Sequence: Synthetic oligonucleotide
taaaatctagtcagtgaattt

SEQ ID NO: 31100 - RNA, 21 nt, synthetic construct
  source 1..21: mol_type = other RNA; note = Description of Artificial Sequence: Synthetic oligonucleotide
ttaaaatctagtcagtgaatt

SEQ ID NO: 31101 - RNA, 21 nt, synthetic construct
  source 1..21: mol_type = other RNA; note = Description of Artificial Sequence: Synthetic oligonucleotide
tgtaaaatctagtcagtgatt

SEQ ID NO: 31102 - RNA, 21 nt, synthetic construct
  source 1..21: mol_type = other RNA; note = Description of Artificial Sequence: Synthetic oligonucleotide
tagtaaaatctagtcagtgtt

SEQ ID NO: 31103 - RNA, 21 nt, synthetic construct
  source 1..21: mol_type = other RNA; note = Description of Artificial Sequence: Synthetic oligonucleotide
tcagtaaaatctagtcagttt

SEQ ID NO: 31104 - RNA, 21 nt, synthetic construct
  source 1..21: mol_type = other RNA; note = Description of Artificial Sequence: Synthetic oligonucleotide
ttcagtaaaatctagtcagtt

SEQ ID NO: 31105 - RNA, 21 nt, synthetic construct
  source 1..21: mol_type = other RNA; note = Description of Artificial Sequence: Synthetic oligonucleotide
tttcagtaaaatctagtcatt

SEQ ID NO: 31106 - RNA, 21 nt, synthetic construct
  source 1..21: mol_type = other RNA; note = Description of Artificial Sequence: Synthetic oligonucleotide
tgttcagtaaaatctagtctt

SEQ ID NO: 31107 - RNA, 21 nt, synthetic construct
  source 1..21: mol_type = other RNA; note = Description of Artificial Sequence: Synthetic oligonucleotide
tagttcagtaaaatctagttt

SEQ ID NO: 31108 - RNA, 21 nt, synthetic construct
  source 1..21: mol_type = other RNA; note = Description of Artificial Sequence: Synthetic oligonucleotide
ttagttcagtaaaatctagtt

SEQ ID NO: 31109 - RNA, 21 nt, synthetic construct
  source 1..21: mol_type = other RNA; note = Description of Artificial Sequence: Synthetic oligonucleotide
tatagttcagtaaaatctatt

SEQ ID NO: 31110 - RNA, 21 nt, synthetic construct
  source 1..21: mol_type = other RNA; note = Description of Artificial Sequence: Synthetic oligonucleotide
tcatagttcagtaaaatcttt

SEQ ID NO: 31111 - RNA, 21 nt, synthetic construct
  source 1..21: mol_type = other RNA; note = Description of Artificial Sequence: Synthetic oligonucleotide
ttcatagttcagtaaaatctt

SEQ ID NO: 31112 - RNA, 21 nt, synthetic construct
  source 1..21: mol_type = other RNA; note = Description of Artificial Sequence: Synthetic oligonucleotide
tttcatagttcagtaaaattt

SEQ ID NO: 31113 - RNA, 21 nt, synthetic construct
  source 1..21: mol_type = other RNA; note = Description of Artificial Sequence: Synthetic oligonucleotide
ttttcatagttcagtaaaatt

SEQ ID NO: 31114 - RNA, 21 nt, synthetic construct
  source 1..21: mol_type = other RNA; note = Description of Artificial Sequence: Synthetic oligonucleotide
tttttcatagttcagtaaatt

SEQ ID NO: 31115 - RNA, 21 nt, synthetic construct
  source 1..21: mol_type = other RNA; note = Description of Artificial Sequence: Synthetic oligonucleotide
tattttcatagttcagtaatt

SEQ ID NO: 31116 - RNA, 21 nt, synthetic construct
  source 1..21: mol_type = other RNA; note = Description of Artificial Sequence: Synthetic oligonucleotide
ttattttcatagttcagtatt

SEQ ID NO: 31117 - RNA, 21 nt, synthetic construct
  source 1..21: mol_type = other RNA; note = Description of Artificial Sequence: Synthetic oligonucleotide
tttattttcatagttcagttt

SEQ ID NO: 31118 - RNA, 21 nt, synthetic construct
  source 1..21: mol_type = other RNA; note = Description of Artificial Sequence: Synthetic oligonucleotide
ttttattttcatagttcagtt

SEQ ID NO: 31119 - RNA, 21 nt, synthetic construct
  source 1..21: mol_type = other RNA; note = Description of Artificial Sequence: Synthetic oligonucleotide
tatttattttcatagttcatt

SEQ ID NO: 31120 - RNA, 21 nt, synthetic construct
  source 1..21: mol_type = other RNA; note = Description of Artificial Sequence: Synthetic oligonucleotide
ttatttattttcatagttctt

SEQ ID NO: 31121 - RNA, 21 nt, synthetic construct
  source 1..21: mol_type = other RNA; note = Description of Artificial Sequence: Synthetic oligonucleotide
tgtatttattttcatagtttt

SEQ ID NO: 31122 - RNA, 21 nt, synthetic construct
  source 1..21: mol_type = other RNA; note = Description of Artificial Sequence: Synthetic oligonucleotide
ttgtatttattttcatagttt

SEQ ID NO: 31123 - RNA, 21 nt, synthetic construct
  source 1..21: mol_type = other RNA; note = Description of Artificial Sequence: Synthetic oligonucleotide
tgtgtatttattttcatagtt

SEQ ID NO: 31124 - RNA, 21 nt, synthetic construct
  source 1..21: mol_type = other RNA; note = Description of Artificial Sequence: Synthetic oligonucleotide
ttgtgtatttattttcatatt

SEQ ID NO: 31125 - RNA, 21 nt, synthetic construct
  source 1..21: mol_type = other RNA; note = Description of Artificial Sequence: Synthetic oligonucleotide
tatgtgtatttattttcattt

SEQ ID NO: 31126 - RNA, 21 nt, synthetic construct
  source 1..21: mol_type = other RNA; note = Description of Artificial Sequence: Synthetic oligonucleotide
ttatgtgtatttattttcatt

SEQ ID NO: 31127 - RNA, 21 nt, synthetic construct
  source 1..21: mol_type = other RNA; note = Description of Artificial Sequence: Synthetic oligonucleotide
tttatgtgtatttattttctt

SEQ ID NO: 31128 - RNA, 21 nt, synthetic construct
  source 1..21: mol_type = other RNA; note = Description of Artificial Sequence: Synthetic oligonucleotide
tattatgtgtatttatttttt

SEQ ID NO: 31129 - RNA, 21 nt, synthetic construct
  source 1..21: mol_type = other RNA; note = Description of Artificial Sequence: Synthetic oligonucleotide
taattatgtgtatttattttt

SEQ ID NO: 31130 - RNA, 21 nt, synthetic construct
  source 1..21: mol_type = other RNA; note = Description of Artificial Sequence: Synthetic oligonucleotide
taaattatgtgtatttatttt

SEQ ID NO: 31131 - RNA, 21 nt, synthetic construct
  source 1..21: mol_type = other RNA; note = Description of Artificial Sequence: Synthetic oligonucleotide
taaaattatgtgtatttattt

SEQ ID NO: 31132 - RNA, 21 nt, synthetic construct
  source 1..21: mol_type = other RNA; note = Description of Artificial Sequence: Synthetic oligonucleotide
taaaaattatgtgtatttatt

SEQ ID NO: 31133 - RNA, 21 nt, synthetic construct
  source 1..21: mol_type = other RNA; note = Description of Artificial Sequence: Synthetic oligonucleotide
tgaaaaattatgtgtattttt

SEQ ID NO: 31134 - RNA, 21 nt, synthetic construct
  source 1..21: mol_type = other RNA; note = Description of Artificial Sequence: Synthetic oligonucleotide
ttgaaaaattatgtgtatttt

SEQ ID NO: 31135 - RNA, 21 nt, synthetic construct
  source 1..21: mol_type = other RNA; note = Description of Artificial Sequence: Synthetic oligonucleotide
tgtgaaaaattatgtgtattt

SEQ ID NO: 31136 - RNA, 21 nt, synthetic construct
  source 1..21: mol_type = other RNA; note = Description of Artificial Sequence: Synthetic oligonucleotide
ttgtgaaaaattatgtgtatt

SEQ ID NO: 31137 - RNA, 21 nt, synthetic construct
  source 1..21: mol_type = other RNA; note = Description of Artificial Sequence: Synthetic oligonucleotide
tttgtgaaaaattatgtgttt

SEQ ID NO: 31138 - RNA, 21 nt, synthetic construct
  source 1..21: mol_type = other RNA; note = Description of Artificial Sequence: Synthetic oligonucleotide
ttttgtgaaaaattatgtgtt

SEQ ID NO: 31139 - RNA, 21 nt, synthetic construct
  source 1..21: mol_type = other RNA; note = Description of Artificial Sequence: Synthetic oligonucleotide
tttttgtgaaaaattatgttt

SEQ ID NO: 31140 - RNA, 21 nt, synthetic construct
  source 1..21: mol_type = other RNA; note = Description of Artificial Sequence: Synthetic oligonucleotide
tattttgtgaaaaattatgtt

SEQ ID NO: 31141 - RNA, 21 nt, synthetic construct
  source 1..21: mol_type = other RNA; note = Description of Artificial Sequence: Synthetic oligonucleotide
taattttgtgaaaaattattt

SEQ ID NO: 31142 - RNA, 21 nt, synthetic construct
  source 1..21: mol_type = other RNA; note = Description of Artificial Sequence: Synthetic oligonucleotide
taaattttgtgaaaaattatt

SEQ ID NO: 31143 - RNA, 21 nt, synthetic construct
  source 1..21: mol_type = other RNA; note = Description of Artificial Sequence: Synthetic oligonucleotide
taaaattttgtgaaaaatttt

SEQ ID NO: 31144 - RNA, 21 nt, synthetic construct
  source 1..21: mol_type = other RNA; note = Description of Artificial Sequence: Synthetic oligonucleotide
tcaaaattttgtgaaaaattt

SEQ ID NO: 31145 - RNA, 21 nt, synthetic construct
  source 1..21: mol_type = other RNA; note = Description of Artificial Sequence: Synthetic oligonucleotide
tccaaaattttgtgaaaaatt

SEQ ID NO: 31146 - RNA, 21 nt, synthetic construct
  source 1..21: mol_type = other RNA; note = Description of Artificial Sequence: Synthetic oligonucleotide
tcccaaaattttgtgaaaatt

SEQ ID NO: 31147 - RNA, 21 nt, synthetic construct
  source 1..21: mol_type = other RNA; note = Description of Artificial Sequence: Synthetic oligonucleotide
tgcccaaaattttgtgaaatt

SEQ ID NO: 31148 - RNA, 21 nt, synthetic construct
  source 1..21: mol_type = other RNA; note = Description of Artificial Sequence: Synthetic oligonucleotide
tggcccaaaattttgtgaatt

SEQ ID NO: 31149 - RNA, 21 nt, synthetic construct
  source 1..21: mol_type = other RNA; note = Description of Artificial Sequence: Synthetic oligonucleotide
tgggcccaaaattttgtgatt

SEQ ID NO: 31150 - RNA, 21 nt, synthetic construct
  source 1..21: mol_type = other RNA; note = Description of Artificial Sequence: Synthetic oligonucleotide
ttgggcccaaaattttgtgtt

SEQ ID NO: 31151 - RNA, 21 nt, synthetic construct
  source 1..21: mol_type = other RNA; note = Description of Artificial Sequence: Synthetic oligonucleotide
tttgggcccaaaattttgttt

SEQ ID NO: 31152 - RNA, 21 nt, synthetic construct
  source 1..21: mol_type = other RNA; note = Description of Artificial Sequence: Synthetic oligonucleotide
tattgggcccaaaattttgtt

SEQ ID NO: 31153 - RNA, 21 nt, synthetic construct
  source 1..21: mol_type = other RNA; note = Description of Artificial Sequence: Synthetic oligonucleotide
taattgggcccaaaatttttt

SEQ ID NO: 31154 - RNA, 21 nt, synthetic construct
  source 1..21: mol_type = other RNA; note = Description of Artificial Sequence: Synthetic oligonucleotide
tgaattgggcccaaaattttt

SEQ ID NO: 31155 - RNA, 21 nt, synthetic construct
  source 1..21: mol_type = other RNA; note = Description of Artificial Sequence: Synthetic oligonucleotide
tggaattgggcccaaaatttt

SEQ ID NO: 31156 - RNA, 21 nt, synthetic construct
  source 1..21: mol_type = other RNA; note = Description of Artificial Sequence: Synthetic oligonucleotide
tgggaattgggcccaaaattt

SEQ ID NO: 31157 - RNA, 21 nt, synthetic construct
  source 1..21: mol_type = other RNA; note = Description of Artificial Sequence: Synthetic oligonucleotide
tggggaattgggcccaaaatt

SEQ ID NO: 31158 - RNA, 21 nt, synthetic construct
  source 1..21: mol_type = other RNA; note = Description of Artificial Sequence: Synthetic oligonucleotide
taggggaattgggcccaaatt

SEQ ID NO: 31159 - RNA, 21 nt, synthetic construct
  source 1..21: mol_type = other RNA; note = Description of Artificial Sequence: Synthetic oligonucleotide
ttaggggaattgggcccaatt

SEQ ID NO: 31160 - RNA, 21 nt, synthetic construct
  source 1..21: mol_type = other RNA; note = Description of Artificial Sequence: Synthetic oligonucleotide
tttaggggaattgggcccatt

SEQ ID NO: 31161 - RNA, 21 nt, synthetic construct
  source 1..21: mol_type = other RNA; note = Description of Artificial Sequence: Synthetic oligonucleotide
ttttaggggaattgggccctt

SEQ ID NO: 31162 - RNA, 21 nt, synthetic construct
  source 1..21: mol_type = other RNA; note = Description of Artificial Sequence: Synthetic oligonucleotide
tttttaggggaattgggcctt

SEQ ID NO: 31163 - RNA, 21 nt, synthetic construct
  source 1..21: mol_type = other RNA; note = Description of Artificial Sequence: Synthetic oligonucleotide
tcttttaggggaattgggctt

SEQ ID NO: 31164 - RNA, 21 nt, synthetic construct
  source 1..21: mol_type = other RNA; note = Description of Artificial Sequence: Synthetic oligonucleotide
ttcttttaggggaattgggtt

SEQ ID NO: 31165 - RNA, 21 nt, synthetic construct
  source 1..21: mol_type = other RNA; note = Description of Artificial Sequence: Synthetic oligonucleotide
tttcttttaggggaattggtt

SEQ ID NO: 31166 - RNA, 21 nt, synthetic construct
  source 1..21: mol_type = other RNA; note = Description of Artificial Sequence: Synthetic oligonucleotide
tattcttttaggggaattgtt

SEQ ID NO: 31167 - RNA, 21 nt, synthetic construct
  source 1..21: mol_type = other RNA; note = Description of Artificial Sequence: Synthetic oligonucleotide
taattcttttaggggaatttt

SEQ ID NO: 31168 - RNA, 21 nt, synthetic construct
  source 1..21: mol_type = other RNA; note = Description of Artificial Sequence: Synthetic oligonucleotide
tcaattcttttaggggaattt

SEQ ID NO: 31169 - RNA, 21 nt, synthetic construct
  source 1..21: mol_type = other RNA; note = Description of Artificial Sequence: Synthetic oligonucleotide
ttcaattcttttaggggaatt

SEQ ID NO: 31170 - RNA, 21 nt, synthetic construct
  source 1..21: mol_type = other RNA; note = Description of Artificial Sequence: Synthetic oligonucleotide
tctcaattcttttaggggatt

SEQ ID NO: 31171 - RNA, 21 nt, synthetic construct
  source 1..21: mol_type = other RNA; note = Description of Artificial Sequence: Synthetic oligonucleotide
tcctcaattcttttaggggtt

SEQ ID NO: 31172 - RNA, 21 nt, synthetic construct
  source 1..21: mol_type = other RNA; note = Description of Artificial Sequence: Synthetic oligonucleotide
ttcctcaattcttttagggtt

SEQ ID NO: 31173 - RNA, 21 nt, synthetic construct
  source 1..21: mol_type = other RNA; note = Description of Artificial Sequence: Synthetic oligonucleotide
tatcctcaattcttttaggtt

SEQ ID NO: 31174 - RNA, 21 nt, synthetic construct
  source 1..21: mol_type = other RNA; note = Description of Artificial Sequence: Synthetic oligonucleotide
taatcctcaattcttttagtt

SEQ ID NO: 31175 - RNA, 21 nt, synthetic construct
  source 1..21: mol_type = other RNA; note = Description of Artificial Sequence: Synthetic oligonucleotide
ttaatcctcaattcttttatt

SEQ ID NO: 31176 - RNA, 21 nt, synthetic construct
  source 1..21: mol_type = other RNA; note = Description of Artificial Sequence: Synthetic oligonucleotide
tctaatcctcaattctttttt

SEQ ID NO: 31177 - RNA, 21 nt, synthetic construct
  source 1..21: mol_type = other RNA; note = Description of Artificial Sequence: Synthetic oligonucleotide
tcctaatcctcaattcttttt

SEQ ID NO: 31178 - RNA, 21 nt, synthetic construct
  source 1..21: mol_type = other RNA; note = Description of Artificial Sequence: Synthetic oligonucleotide
tccctaatcctcaattctttt

SEQ ID NO: 31179 - RNA, 21 nt, synthetic construct
  source 1..21: mol_type = other RNA; note = Description of Artificial Sequence: Synthetic oligonucleotide
ttccctaatcctcaattcttt

SEQ ID NO: 31180 - RNA, 21 nt, synthetic construct
  source 1..21: mol_type = other RNA; note = Description of Artificial Sequence: Synthetic oligonucleotide
tctccctaatcctcaattctt

SEQ ID NO: 31181 - RNA, 21 nt, synthetic construct
  source 1..21: mol_type = other RNA; note = Description of Artificial Sequence: Synthetic oligonucleotide
ttctccctaatcctcaatttt

SEQ ID NO: 31182 - RNA, 21 nt, synthetic construct
  source 1..21: mol_type = other RNA; note = Description of Artificial Sequence: Synthetic oligonucleotide
tttctccctaatcctcaattt

SEQ ID NO: 31183 - RNA, 21 nt, synthetic construct
  source 1..21: mol_type = other RNA; note = Description of Artificial Sequence: Synthetic oligonucleotide
ttttctccctaatcctcaatt

SEQ ID NO: 31184 - RNA, 21 nt, synthetic construct
  source 1..21: mol_type = other RNA; note = Description of Artificial Sequence: Synthetic oligonucleotide
tctttctccctaatcctcatt

SEQ ID NO: 31185 - RNA, 21 nt, synthetic construct
  source 1..21: mol_type = other RNA; note = Description of Artificial Sequence: Synthetic oligonucleotide
tcctttctccctaatcctctt

SEQ ID NO: 31186 - RNA, 21 nt, synthetic construct
  source 1..21: mol_type = other RNA; note = Description of Artificial Sequence: Synthetic oligonucleotide
ttcctttctccctaatccttt

SEQ ID NO: 31187 - RNA, 21 nt, synthetic construct
  source 1..21: mol_type = other RNA; note = Description of Artificial Sequence: Synthetic oligonucleotide
tctcctttctccctaatcctt

SEQ ID NO: 31188 - RNA, 21 nt, synthetic construct
  source 1..21: mol_type = other RNA; note = Description of Artificial Sequence: Synthetic oligonucleotide
ttctcctttctccctaatctt

SEQ ID NO: 31189 - RNA, 21 nt, synthetic construct
  source 1..21: mol_type = other RNA; note = Description of Artificial Sequence: Synthetic oligonucleotide
tgtctcctttctccctaattt

SEQ ID NO: 31190 - RNA, 21 nt, synthetic construct
  source 1..21: mol_type = other RNA; note = Description of Artificial Sequence: Synthetic oligonucleotide
ttgtctcctttctccctaatt

SEQ ID NO: 31191 - RNA, 21 nt, synthetic construct
  source 1..21: mol_type = other RNA; note = Description of Artificial Sequence: Synthetic oligonucleotide
tttgtctcctttctccctatt

SEQ ID NO: 31192 - RNA, 21 nt, synthetic construct
  source 1..21: mol_type = other RNA; note = Description of Artificial Sequence: Synthetic oligonucleotide
tgttgtctcctttctcccttt

SEQ ID NO: 31193 - RNA, 21 nt, synthetic construct
  source 1..21: mol_type = other RNA; note = Description of Artificial Sequence: Synthetic oligonucleotide
tagttgtctcctttctccctt

SEQ ID NO: 31194 - RNA, 21 nt, synthetic construct
  source 1..21: mol_type = other RNA; note = Description of Artificial Sequence: Synthetic oligonucleotide
tgagttgtctcctttctcctt

SEQ ID NO: 31195 - RNA, 21 nt, synthetic construct
  source 1..21: mol_type = other RNA; note = Description of Artificial Sequence: Synthetic oligonucleotide
ttgagttgtctcctttctctt

SEQ ID NO: 31196 - RNA, 21 nt, synthetic construct
  source 1..21: mol_type = other RNA; note = Description of Artificial Sequence: Synthetic oligonucleotide
tttgagttgtctcctttcttt

SEQ ID NO: 31197 - RNA, 21 nt, synthetic construct
  source 1..21: mol_type = other RNA; note = Description of Artificial Sequence: Synthetic oligonucleotide
ttttgagttgtctcctttctt

SEQ ID NO: 31198 - RNA, 21 nt, synthetic construct
  source 1..21: mol_type = other RNA; note = Description of Artificial Sequence: Synthetic oligonucleotide
tctttgagttgtctccttttt

SEQ ID NO: 31199 - RNA, 21 nt, synthetic construct
  source 1..21: mol_type = other RNA; note = Description of Artificial Sequence: Synthetic oligonucleotide
tactttgagttgtctcctttt

SEQ ID NO: 31200 - RNA, 21 nt, synthetic construct
  source 1..21: mol_type = other RNA; note = Description of Artificial Sequence: Synthetic oligonucleotide
tgactttgagttgtctccttt

SEQ ID NO: 31201 - RNA, 21 nt, synthetic construct
  source 1..21: mol_type = other RNA; note = Description of Artificial Sequence: Synthetic oligonucleotide
ttgactttgagttgtctcctt

SEQ ID NO: 31202 - RNA, 21 nt, synthetic construct
  source 1..21: mol_type = other RNA; note = Description of Artificial Sequence: Synthetic oligonucleotide
tatgactttgagttgtctctt

SEQ ID NO: 31203 - RNA, 21 nt, synthetic construct
  source 1..21: mol_type = other RNA; note = Description of Artificial Sequence: Synthetic oligonucleotide
tgatgactttgagttgtcttt

SEQ ID NO: 31204 - RNA, 21 nt, synthetic construct
  source 1..21: mol_type = other RNA; note = Description of Artificial Sequence: Synthetic oligonucleotide
tggatgactttgagttgtctt

SEQ ID NO: 31205 - RNA, 21 nt, synthetic construct
  source 1..21: mol_type = other RNA; note = Description of Artificial Sequence: Synthetic oligonucleotide
tgggatgactttgagttgttt

SEQ ID NO: 31206 - RNA, 21 nt, synthetic construct
  source 1..21: mol_type = other RNA; note = Description of Artificial Sequence: Synthetic oligonucleotide
ttgggatgactttgagttgtt

SEQ ID NO: 31207 - RNA, 21 nt, synthetic construct
  source 1..21: mol_type = other RNA; note = Description of Artificial Sequence: Synthetic oligonucleotide
tatgggatgactttgagtttt

SEQ ID NO: 31208 - RNA, 21 nt, synthetic construct
  source 1..21: mol_type = other RNA; note = Description of Artificial Sequence: Synthetic oligonucleotide
taatgggatgactttgagttt

SEQ ID NO: 31209 - RNA, 21 nt, synthetic construct
  source 1..21: mol_type = other RNA; note = Description of Artificial Sequence: Synthetic oligonucleotide
ttaatgggatgactttgagtt

SEQ ID NO: 31210 - RNA, 21 nt, synthetic construct
  source 1..21: mol_type = other RNA; note = Description of Artificial Sequence: Synthetic oligonucleotide
tttaatgggatgactttgatt

SEQ ID NO: 31211 - RNA, 21 nt, synthetic construct
  source 1..21: mol_type = other RNA; note = Description of Artificial Sequence: Synthetic oligonucleotide
tcttaatgggatgactttgtt

SEQ ID NO: 31212 - RNA, 21 nt, synthetic construct
  source 1..21: mol_type = other RNA; note = Description of Artificial Sequence: Synthetic oligonucleotide
tacttaatgggatgacttttt

SEQ ID NO: 31213 - RNA, 21 nt, synthetic construct
  source 1..21: mol_type = other RNA; note = Description of Artificial Sequence: Synthetic oligonucleotide
tcacttaatgggatgactttt

SEQ ID NO: 31214 - RNA, 21 nt, synthetic construct
  source 1..21: mol_type = other RNA; note = Description of Artificial Sequence: Synthetic oligonucleotide
tgcacttaatgggatgacttt

SEQ ID NO: 31215 - RNA, 21 nt, synthetic construct
  source 1..21: mol_type = other RNA; note = Description of Artificial Sequence: Synthetic oligonucleotide
ttgcacttaatgggatgactt

SEQ ID NO: 31216 - RNA, 21 nt, synthetic construct
  source 1..21: mol_type = other RNA; note = Description of Artificial Sequence: Synthetic oligonucleotide
tctgcacttaatgggatgatt

SEQ ID NO: 31217 - RNA, 21 nt, synthetic construct
  source 1..21: mol_type = other RNA; note = Description of Artificial Sequence: Synthetic oligonucleotide
tactgcacttaatgggatgtt

SEQ ID NO: 31218 - RNA, 21 nt, synthetic construct
  source 1..21: mol_type = other RNA; note = Description of Artificial Sequence: Synthetic oligonucleotide
taactgcacttaatgggattt

SEQ ID NO: 31219 - RNA, 21 nt, synthetic construct
  source 1..21: mol_type = other RNA; note = Description of Artificial Sequence: Synthetic oligonucleotide
taaactgcacttaatgggatt

SEQ ID NO: 31220 - RNA, 21 nt, synthetic construct
  source 1..21: mol_type = other RNA; note = Description of Artificial Sequence: Synthetic oligonucleotide
tgaaactgcacttaatgggtt

SEQ ID NO: 31221 - RNA, 21 nt, synthetic construct
  source 1..21: mol_type = other RNA; note = Description of Artificial Sequence: Synthetic oligonucleotide
tagaaactgcacttaatggtt

SEQ ID NO: 31222 - RNA, 21 nt, synthetic construct
  source 1..21: mol_type = other RNA; note = Description of Artificial Sequence: Synthetic oligonucleotide
taagaaactgcacttaatgtt

SEQ ID NO: 31223 - RNA, 21 nt, synthetic construct
  source 1..21: mol_type = other RNA; note = Description of Artificial Sequence: Synthetic oligonucleotide
taaagaaactgcacttaattt

SEQ ID NO: 31224 - RNA, 21 nt, synthetic construct
  source 1..21: mol_type = other RNA; note = Description of Artificial Sequence: Synthetic oligonucleotide
tcaaagaaactgcacttaatt

SEQ ID NO: 31225 - RNA, 21 nt, synthetic construct
  source 1..21: mol_type = other RNA; note = Description of Artificial Sequence: Synthetic oligonucleotide
ttcaaagaaactgcacttatt

SEQ ID NO: 31226 - RNA, 21 nt, synthetic construct
  source 1..21: mol_type = other RNA; note = Description of Artificial Sequence: Synthetic oligonucleotide
tttcaaagaaactgcactttt

SEQ ID NO: 31227 - RNA, 21 nt, synthetic construct
  source 1..21: mol_type = other RNA; note = Description of Artificial Sequence: Synthetic oligonucleotide
tattcaaagaaactgcacttt

SEQ ID NO: 31228 - RNA, 21 nt, synthetic construct
  source 1..21: mol_type = other RNA; note = Description of Artificial Sequence: Synthetic oligonucleotide
tgattcaaagaaactgcactt

SEQ ID NO: 31229 - RNA, 21 nt, synthetic construct
  source 1..21: mol_type = other RNA; note = Description of Artificial Sequence: Synthetic oligonucleotide
tagattcaaagaaactgcatt

SEQ ID NO: 31230 - RNA, 21 nt, synthetic construct
  source 1..21: mol_type = other RNA; note = Description of Artificial Sequence: Synthetic oligonucleotide
taagattcaaagaaactgctt

SEQ ID NO: 31231 - RNA, 21 nt, synthetic construct
  source 1..21: mol_type = other RNA; note = Description of Artificial Sequence: Synthetic oligonucleotide
tgaagattcaaagaaactgtt

SEQ ID NO: 31232 - RNA, 21 nt, synthetic construct
  source 1..21: mol_type = other RNA; note = Description of Artificial Sequence: Synthetic oligonucleotide
tagaagattcaaagaaacttt

SEQ ID NO: 31233 - RNA, 21 nt, synthetic construct
  source 1..21: mol_type = other RNA; note = Description of Artificial Sequence: Synthetic oligonucleotide
tcagaagattcaaagaaactt

SEQ ID NO: 31234 - RNA, 21 nt, synthetic construct
  source 1..21: mol_type = other RNA; note = Description of Artificial Sequence: Synthetic oligonucleotide
tgcagaagattcaaagaaatt

SEQ ID NO: 31235 - RNA, 21 nt, synthetic construct
  source 1..21: mol_type = other RNA; note = Description of Artificial Sequence: Synthetic oligonucleotide
tagcagaagattcaaagaatt

SEQ ID NO: 31236 - RNA, 21 nt, synthetic construct
  source 1..21: mol_type = other RNA; note = Description of Artificial Sequence: Synthetic oligonucleotide
taagcagaagattcaaagatt

SEQ ID NO: 31237 - RNA, 21 nt, synthetic construct
  source 1..21: mol_type = other RNA; note = Description of Artificial Sequence: Synthetic oligonucleotide
taaagcagaagattcaaagtt

SEQ ID NO: 31238 - RNA, 21 nt, synthetic construct
  source 1..21: mol_type = other RNA; note = Description of Artificial Sequence: Synthetic oligonucleotide
ttaaagcagaagattcaaatt

SEQ ID NO: 31239 - RNA, 21 nt, synthetic construct
  source 1..21: mol_type = other RNA; note = Description of Artificial Sequence: Synthetic oligonucleotide
tataaagcagaagattcaatt

SEQ ID NO: 31240 - RNA, 21 nt, synthetic construct
  source 1..21: mol_type = other RNA; note = Description of Artificial Sequence: Synthetic oligonucleotide
tgataaagcagaagattcatt

SEQ ID NO: 31241 - RNA, 21 nt, synthetic construct
  source 1..21: mol_type = other RNA; note = Description of Artificial Sequence: Synthetic oligonucleotide
tagataaagcagaagattctt

SEQ ID NO: 31242 - RNA, 21 nt, synthetic construct
  source 1..21: mol_type = other RNA; note = Description of Artificial Sequence: Synthetic oligonucleotide
taagataaagcagaagatttt

SEQ ID NO: 31243 - RNA, 21 nt, synthetic construct
  source 1..21: mol_type = other RNA; note = Description of Artificial Sequence: Synthetic oligonucleotide
taaagataaagcagaagattt

SEQ ID NO: 31244 - RNA, 21 nt, synthetic construct
  source 1..21: mol_type = other RNA; note = Description of Artificial Sequence: Synthetic oligonucleotide
ttaaagataaagcagaagatt

SEQ ID NO: 31245 - RNA, 21 nt, synthetic construct
  source 1..21: mol_type = other RNA; note = Description of Artificial Sequence: Synthetic oligonucleotide
tttaaagataaagcagaagtt

SEQ ID NO: 31246 - RNA, 21 nt, synthetic construct
  source 1..21: mol_type = other RNA; note = Description of Artificial Sequence: Synthetic oligonucleotide
ttttaaagataaagcagaatt

SEQ ID NO: 31247 - RNA, 21 nt, synthetic construct
  source 1..21: mol_type = other RNA; note = Description of Artificial Sequence: Synthetic oligonucleotide
tttttaaagataaagcagatt

SEQ ID NO: 31248 - RNA, 21 nt, synthetic construct
  source 1..21: mol_type = other RNA; note = Description of Artificial Sequence: Synthetic oligonucleotide
ttttttaaagataaagcagtt

SEQ ID NO: 31249 - RNA, 21 nt, synthetic construct
  source 1..21: mol_type = other RNA; note = Description of Artificial Sequence: Synthetic oligonucleotide
tatttttaaagataaagcatt

SEQ ID NO: 31250 - RNA, 21 nt, synthetic construct
  source 1..21: mol_type = other RNA; note = Description of Artificial Sequence: Synthetic oligonucleotide
taatttttaaagataaagctt

SEQ ID NO: 31251 - RNA, 21 nt, synthetic construct
  source 1..21: mol_type = other RNA; note = Description of Artificial Sequence: Synthetic oligonucleotide
taaatttttaaagataaagtt

SEQ ID NO: 31252 - RNA, 21 nt, synthetic construct
  source 1..21: mol_type = other RNA; note = Description of Artificial Sequence: Synthetic oligonucleotide
tcaaatttttaaagataaatt

SEQ ID NO: 31253 - RNA, 21 nt, synthetic construct
  source 1..21: mol_type = other RNA; note = Description of Artificial Sequence: Synthetic oligonucleotide
tacaaatttttaaagataatt

SEQ ID NO: 31254 - RNA, 21 nt, synthetic construct
  source 1..21: mol_type = other RNA; note = Description of Artificial Sequence: Synthetic oligonucleotide
ttacaaatttttaaagatatt

SEQ ID NO: 31255 - RNA, 21 nt, synthetic construct
  source 1..21: mol_type = other RNA; note = Description of Artificial Sequence: Synthetic oligonucleotide
tatacaaatttttaaagattt

SEQ ID NO: 31256 - RNA, 21 nt, synthetic construct
  source 1..21: mol_type = other RNA; note = Description of Artificial Sequence: Synthetic oligonucleotide
ttatacaaatttttaaagatt

SEQ ID NO: 31257 - RNA, 21 nt, synthetic construct
  source 1..21: mol_type = other RNA; note = Description of Artificial Sequence: Synthetic oligonucleotide
tttatacaaatttttaaagtt

SEQ ID NO: 31258 - RNA, 21 nt, synthetic construct
  source 1..21: mol_type = other RNA; note = Description of Artificial Sequence: Synthetic oligonucleotide
tattatacaaatttttaaatt

SEQ ID NO: 31259 - RNA, 21 nt, synthetic construct
  source 1..21: mol_type = other RNA; note = Description of Artificial Sequence: Synthetic oligonucleotide
taattatacaaatttttaatt

SEQ ID NO: 31260 - RNA, 21 nt, synthetic construct
  source 1..21: mol_type = other RNA; note = Description of Artificial Sequence: Synthetic oligonucleotide
taaattatacaaatttttatt

SEQ ID NO: 31261 - RNA, 21 nt, synthetic construct
  source 1..21: mol_type = other RNA; note = Description of Artificial Sequence: Synthetic oligonucleotide
ttaaattatacaaattttttt

SEQ ID NO: 31262 - RNA, 21 nt, synthetic construct
  source 1..21: mol_type = other RNA; note = Description of Artificial Sequence: Synthetic oligonucleotide
tataaattatacaaatttttt

SEQ ID NO: 31263 - RNA, 21 nt, synthetic construct
  source 1..21: mol_type = other RNA; note = Description of Artificial Sequence: Synthetic oligonucleotide
ttataaattatacaaattttt

SEQ ID NO: 31264 - RNA, 21 nt, synthetic construct
  source 1..21: mol_type = other RNA; note = Description of Artificial Sequence: Synthetic oligonucleotide
tatataaattatacaaatttt

SEQ ID NO: 31265 - RNA, 21 nt, synthetic construct
  source 1..21: mol_type = other RNA; note = Description of Artificial Sequence: Synthetic oligonucleotide
ttatataaattatacaaattt

SEQ ID NO: 31266 - RNA, 21 nt, synthetic construct
  source 1..21: mol_type = other RNA; note = Description of Artificial Sequence: Synthetic oligonucleotide
tatatataaattatacaaatt

SEQ ID NO: 31267 - RNA, 21 nt, synthetic construct
  source 1..21: mol_type = other RNA; note = Description of Artificial Sequence: Synthetic oligonucleotide
taatatataaattatacaatt

SEQ ID NO: 31268 - RNA, 21 nt, synthetic construct
  source 1..21: mol_type = other RNA; note = Description of Artificial Sequence: Synthetic oligonucleotide
taaatatataaattatacatt

SEQ ID NO: 31269 - RNA, 21 nt, synthetic construct
  source 1..21: mol_type = other RNA; note = Description of Artificial Sequence: Synthetic oligonucleotide
taaaatatataaattatactt

SEQ ID NO: 31270 - RNA, 21 nt, synthetic construct
  source 1..21: mol_type = other RNA; note = Description of Artificial Sequence: Synthetic oligonucleotide
ttaaaatatataaattatatt

SEQ ID NO: 31271 - RNA, 21 nt, synthetic construct
  source 1..21: mol_type = other RNA; note = Description of Artificial Sequence: Synthetic oligonucleotide
tataaaatatataaattattt

SEQ ID NO: 31272 - RNA, 21 nt, synthetic construct
  source 1..21: mol_type = other RNA; note = Description of Artificial Sequence: Synthetic oligonucleotide
taataaaatatataaattatt

SEQ ID NO: 31273 - RNA, 21 nt, synthetic construct
  source 1..21: mol_type = other RNA; note = Description of Artificial Sequence: Synthetic oligonucleotide
tgaataaaatatataaatttt

SEQ ID NO: 31274 - RNA, 21 nt, synthetic construct
  source 1..21: mol_type = other RNA; note = Description of Artificial Sequence: Synthetic oligonucleotide
tagaataaaatatataaattt

SEQ ID NO: 31275 - RNA, 21 nt, synthetic construct
  source 1..21: mol_type = other RNA; note = Description of Artificial Sequence: Synthetic oligonucleotide
ttagaataaaatatataaatt

SEQ ID NO: 31276 - RNA, 21 nt, synthetic construct
  source 1..21: mol_type = other RNA; note = Description of Artificial Sequence: Synthetic oligonucleotide
tatagaataaaatatataatt

SEQ ID NO: 31277 - RNA, 21 nt, synthetic construct
  source 1..21: mol_type = other RNA; note = Description of Artificial Sequence: Synthetic oligonucleotide
tcatagaataaaatatatatt

SEQ ID NO: 31278 - RNA, 21 nt, synthetic construct
  source 1..21: mol_type = other RNA; note = Description of Artificial Sequence: Synthetic oligonucleotide
tacatagaataaaatatattt

SEQ ID NO: 31279 - RNA, 21 nt, synthetic construct
  source 1..21: mol_type = other RNA; note = Description of Artificial Sequence: Synthetic oligonucleotide
tcacatagaataaaatatatt

SEQ ID NO: 31280 - RNA, 21 nt, synthetic construct
  source 1..21: mol_type = other RNA; note = Description of Artificial Sequence: Synthetic oligonucleotide
tacacatagaataaaatattt

SEQ ID NO: 31281 - RNA, 21 nt, synthetic construct
  source 1..21: mol_type = other RNA; note = Description of Artificial Sequence: Synthetic oligonucleotide
taacacatagaataaaatatt

SEQ ID NO: 31282 - RNA, 21 nt, synthetic construct
  source 1..21: mol_type = other RNA; note = Description of Artificial Sequence: Synthetic oligonucleotide
tgaacacatagaataaaattt

SEQ ID NO: 31283 - RNA, 21 nt, synthetic construct
  source 1..21: mol_type = other RNA; note = Description of Artificial Sequence: Synthetic oligonucleotide
tggaacacatagaataaaatt

SEQ ID NO: 31284 - RNA, 21 nt, synthetic construct
  source 1..21: mol_type = other RNA; note = Description of Artificial Sequence: Synthetic oligonucleotide
ttggaacacatagaataaatt

SEQ ID NO: 31285 - RNA, 21 nt, synthetic construct
  source 1..21: mol_type = other RNA; note = Description of Artificial Sequence: Synthetic oligonucleotide
tatggaacacatagaataatt

SEQ ID NO: 31286 - RNA, 21 nt, synthetic construct
  source 1..21: mol_type = other RNA; note = Description of Artificial Sequence: Synthetic oligonucleotide
ttatggaacacatagaatatt

SEQ ID NO: 31287 - RNA, 21 nt, synthetic construct
  source 1..21: mol_type = other RNA; note = Description of Artificial Sequence: Synthetic oligonucleotide
tctatggaacacatagaattt

SEQ ID NO: 31288 - RNA, 21 nt, synthetic construct
  source 1..21: mol_type = other RNA; note = Description of Artificial Sequence: Synthetic oligonucleotide
ttctatggaacacatagaatt

SEQ ID NO: 31289 - RNA, 21 nt, synthetic construct
  source 1..21: mol_type = other RNA; note = Description of Artificial Sequence: Synthetic oligonucleotide
tatctatggaacacatagatt

SEQ ID NO: 31290 - RNA, 21 nt, synthetic construct
  source 1..21: mol_type = other RNA; note = Description of Artificial Sequence: Synthetic oligonucleotide
ttatctatggaacacatagtt

SEQ ID NO: 31291 - RNA, 21 nt, synthetic construct
  source 1..21: mol_type = other RNA; note = Description of Artificial Sequence: Synthetic oligonucleotide
tatatctatggaacacatatt

SEQ ID NO: 31292 - RNA, 21 nt, synthetic construct
  source 1..21: mol_type = other RNA; note = Description of Artificial Sequence: Synthetic oligonucleotide
tgatatctatggaacacattt

SEQ ID NO: 31293 - RNA, 21 nt, synthetic construct
  source 1..21: mol_type = other RNA; note = Description of Artificial Sequence: Synthetic oligonucleotide
tagatatctatggaacacatt

SEQ ID NO: 31294 - RNA, 21 nt, synthetic construct
  source 1..21: mol_type = other RNA; note = Description of Artificial Sequence: Synthetic oligonucleotide
taagatatctatggaacactt

SEQ ID NO: 31295 - RNA, 21 nt, synthetic construct
  source 1..21: mol_type = other RNA; note = Description of Artificial Sequence: Synthetic oligonucleotide
ttaagatatctatggaacatt

SEQ ID NO: 31296 - RNA, 21 nt, synthetic construct
  source 1..21: mol_type = other RNA; note = Description of Artificial Sequence: Synthetic oligonucleotide
tttaagatatctatggaactt

SEQ ID NO: 31297 - RNA, 21 nt, synthetic construct
  source 1..21: mol_type = other RNA; note = Description of Artificial Sequence: Synthetic oligonucleotide
tattaagatatctatggaatt

SEQ ID NO: 31298 - RNA, 21 nt, synthetic construct
  source 1..21: mol_type = other RNA; note = Description of Artificial Sequence: Synthetic oligonucleotide
tcattaagatatctatggatt

SEQ ID NO: 31299 - RNA, 21 nt, synthetic construct
  source 1..21: mol_type = other RNA; note = Description of Artificial Sequence: Synthetic oligonucleotide
tacattaagatatctatggtt

SEQ ID NO: 31300 - RNA, 21 nt, synthetic construct
  source 1..21: mol_type = other RNA; note = Description of Artificial Sequence: Synthetic oligonucleotide
ttacattaagatatctatgtt

SEQ ID NO: 31301 - RNA, 21 nt, synthetic construct
  source 1..21: mol_type = other RNA; note = Description of Artificial Sequence: Synthetic oligonucleotide
tttacattaagatatctattt

SEQ ID NO: 31302 - RNA, 21 nt, synthetic construct
  source 1..21: mol_type = other RNA; note = Description of Artificial Sequence: Synthetic oligonucleotide
ttttacattaagatatctatt

SEQ ID NO: 31303 - RNA, 21 nt, synthetic construct
  source 1..21: mol_type = other RNA; note = Description of Artificial Sequence: Synthetic oligonucleotide
tttttacattaagatatcttt

SEQ ID NO: 31304 - RNA, 21 nt, synthetic construct
  source 1..21: mol_type = other RNA; note = Description of Artificial Sequence: Synthetic oligonucleotide
tattttacattaagatatctt

SEQ ID NO: 31305 - RNA, 21 nt, synthetic construct
  source 1..21: mol_type = other RNA; note = Description of Artificial Sequence: Synthetic oligonucleotide
taattttacattaagatattt

SEQ ID NO: 31306 - RNA, 21 nt, synthetic construct
  source 1..21: mol_type = other RNA; note = Description of Artificial Sequence: Synthetic oligonucleotide
ttaattttacattaagatatt

SEQ ID NO: 31307 - RNA, 21 nt, synthetic construct
  source 1..21: mol_type = other RNA; note = Description of Artificial Sequence: Synthetic oligonucleotide
tctaattttacattaagattt

SEQ ID NO: 31308 - RNA, 21 nt, synthetic construct
  source 1..21: mol_type = other RNA; note = Description of Artificial Sequence: Synthetic oligonucleotide
tactaattttacattaagatt

SEQ ID NO: 31309 - RNA, 21 nt, synthetic construct
  source 1..21: mol_type = other RNA; note = Description of Artificial Sequence: Synthetic oligonucleotide
tgactaattttacattaagtt

SEQ ID NO: 31310 - RNA, 21 nt, synthetic construct
  source 1..21: mol_type = other RNA; note = Description of Artificial Sequence: Synthetic oligonucleotide
ttgactaattttacattaatt

SEQ ID NO: 31311 - RNA, 21 nt, synthetic construct
  source 1..21: mol_type = other RNA; note = Description of Artificial Sequence: Synthetic oligonucleotide
tatgactaattttacattatt

SEQ ID NO: 31312 - RNA, 21 nt, synthetic construct
  source 1..21: mol_type = other RNA; note = Description of Artificial Sequence: Synthetic oligonucleotide
taatgactaattttacatttt

SEQ ID NO: 31313 - RNA, 21 nt, synthetic construct
  source 1..21: mol_type = other RNA; note = Description of Artificial Sequence: Synthetic oligonucleotide
taaatgactaattttacattt

SEQ ID NO: 31314 - RNA, 21 nt, synthetic construct
  source 1..21: mol_type = other RNA; note = Description of Artificial Sequence: Synthetic oligonucleotide
ttaaatgactaattttacatt

SEQ ID NO: 31315 - RNA, 21 nt, synthetic construct
  source 1..21: mol_type = other RNA; note = Description of Artificial Sequence: Synthetic oligonucleotide
tttaaatgactaattttactt

SEQ ID NO: 31316 - RNA, 21 nt, synthetic construct
  source 1..21: mol_type = other RNA; note = Description of Artificial Sequence: Synthetic oligonucleotide
ttttaaatgactaattttatt

SEQ ID NO: 31317 - RNA, 21 nt, synthetic construct
  source 1..21: mol_type = other RNA; note = Description of Artificial Sequence: Synthetic oligonucleotide
tatttaaatgactaatttttt

SEQ ID NO: 31318 - RNA, 21 nt, synthetic construct
  source 1..21: mol_type = other RNA; note = Description of Artificial Sequence: Synthetic oligonucleotide
taatttaaatgactaattttt

SEQ ID NO: 31319 - RNA, 21 nt, synthetic construct
  source 1..21: mol_type = other RNA; note = Description of Artificial Sequence: Synthetic oligonucleotide
ttaatttaaatgactaatttt

SEQ ID NO: 31320 - RNA, 21 nt, synthetic construct
  source 1..21: mol_type = other RNA; note = Description of Artificial Sequence: Synthetic oligonucleotide
tgtaatttaaatgactaattt

SEQ ID NO: 31321 - RNA, 21 nt, synthetic construct
  source 1..21: mol_type = other RNA; note = Description of Artificial Sequence: Synthetic oligonucleotide
ttgtaatttaaatgactaatt

SEQ ID NO: 31322 - RNA, 21 nt, synthetic construct
  source 1..21: mol_type = other RNA; note = Description of Artificial Sequence: Synthetic oligonucleotide
tgtgtaatttaaatgactatt

SEQ ID NO: 31323 - RNA, 21 nt, synthetic construct
  source 1..21: mol_type = other RNA; note = Description of Artificial Sequence: Synthetic oligonucleotide
tagtgtaatttaaatgacttt

SEQ ID NO: 31324 - RNA, 21 nt, synthetic construct
  source 1..21: mol_type = other RNA; note = Description of Artificial Sequence: Synthetic oligonucleotide
tcagtgtaatttaaatgactt

SEQ ID NO: 31325 - RNA, 21 nt, synthetic construct
  source 1..21: mol_type = other RNA; note = Description of Artificial Sequence: Synthetic oligonucleotide
tacagtgtaatttaaatgatt

SEQ ID NO: 31326 - RNA, 21 nt, synthetic construct
  source 1..21: mol_type = other RNA; note = Description of Artificial Sequence: Synthetic oligonucleotide
tgacagtgtaatttaaatgtt

SEQ ID NO: 31327 - RNA, 21 nt, synthetic construct
  source 1..21: mol_type = other RNA; note = Description of Artificial Sequence: Synthetic oligonucleotide
ttgacagtgtaatttaaattt

SEQ ID NO: 31328 - RNA, 21 nt, synthetic construct
  source 1..21: mol_type = other RNA; note = Description of Artificial Sequence: Synthetic oligonucleotide
tttgacagtgtaatttaaatt

SEQ ID NO: 31329 - RNA, 21 nt, synthetic construct
  source 1..21: mol_type = other RNA; note = Description of Artificial Sequence: Synthetic oligonucleotide
tattgacagtgtaatttaatt

SEQ ID NO: 31330 - RNA, 21 nt, synthetic construct
  source 1..21: mol_type = other RNA; note = Description of Artificial Sequence: Synthetic oligonucleotide
taattgacagtgtaatttatt

SEQ ID NO: 31331 - RNA, 21 nt, synthetic construct
  source 1..21: mol_type = other RNA; note = Description of Artificial Sequence: Synthetic oligonucleotide
ttaattgacagtgtaattttt

SEQ ID NO: 31332 - RNA, 21 nt, synthetic construct
  source 1..21: mol_type = other RNA; note = Description of Artificial Sequence: Synthetic oligonucleotide
tttaattgacagtgtaatttt

SEQ ID NO: 31333 - RNA, 21 nt, synthetic construct
  source 1..21: mol_type = other RNA; note = Description of Artificial Sequence: Synthetic oligonucleotide
ttttaattgacagtgtaattt

SEQ ID NO: 31334 - RNA, 21 nt, synthetic construct
  source 1..21: mol_type = other RNA; note = Description of Artificial Sequence: Synthetic oligonucleotide
tttttaattgacagtgtaatt

SEQ ID NO: 31335 - RNA, 21 nt, synthetic construct
  source 1..21: mol_type = other RNA; note = Description of Artificial Sequence: Synthetic oligonucleotide
tcttttaattgacagtgtatt

SEQ ID NO: 31336 - RNA, 21 nt, synthetic construct
  source 1..21: mol_type = other RNA; note = Description of Artificial Sequence: Synthetic oligonucleotide
tacttttaattgacagtgttt

SEQ ID NO: 31337 - RNA, 21 nt, synthetic construct
  source 1..21: mol_type = other RNA; note = Description of Artificial Sequence: Synthetic oligonucleotide
ttacttttaattgacagtgtt

SEQ ID NO: 31338 - RNA, 21 nt, synthetic construct
  source 1..21: mol_type = other RNA; note = Description of Artificial Sequence: Synthetic oligonucleotide
tttacttttaattgacagttt

SEQ ID NO: 31339 - RNA, 21 nt, synthetic construct
  source 1..21: mol_type = other RNA; note = Description of Artificial Sequence: Synthetic oligonucleotide
tattacttttaattgacagtt

SEQ ID NO: 31340 - RNA, 21 nt, synthetic construct
  source 1..21: mol_type = other RNA; note = Description of Artificial Sequence: Synthetic oligonucleotide
tcattacttttaattgacatt

SEQ ID NO: 31341 - RNA, 21 nt, synthetic construct
  source 1..21: mol_type = other RNA; note = Description of Artificial Sequence: Synthetic oligonucleotide
tccattacttttaattgactt

SEQ ID NO: 31342 - RNA, 21 nt, synthetic construct
  source 1..21: mol_type = other RNA; note = Description of Artificial Sequence: Synthetic oligonucleotide
tcccattacttttaattgatt

SEQ ID NO: 31343 - RNA, 21 nt, synthetic construct
  source 1..21: mol_type = other RNA; note = Description of Artificial Sequence: Synthetic oligonucleotide
tgcccattacttttaattgtt

SEQ ID NO: 31344 - RNA, 21 nt, synthetic construct
  source 1..21: mol_type = other RNA; note = Description of Artificial Sequence: Synthetic oligonucleotide
ttgcccattacttttaatttt

SEQ ID NO: 31345 - RNA, 21 nt, synthetic construct
  source 1..21: mol_type = other RNA; note = Description of Artificial Sequence: Synthetic oligonucleotide
tttgcccattacttttaattt

SEQ ID NO: 31346 - RNA, 21 nt, synthetic construct
  source 1..21: mol_type = other RNA; note = Description of Artificial Sequence: Synthetic oligonucleotide
tcttgcccattacttttaatt

SEQ ID NO: 31347 - RNA, 21 nt, synthetic construct
  source 1..21: mol_type = other RNA; note = Description of Artificial Sequence: Synthetic oligonucleotide
ttcttgcccattacttttatt

SEQ ID NO: 31348 - RNA, 21 nt, synthetic construct
  source 1..21: mol_type = other RNA; note = Description of Artificial Sequence: Synthetic oligonucleotide
tctcttgcccattactttttt

SEQ ID NO: 31349 - RNA, 21 nt, synthetic construct
  source 1..21: mol_type = other RNA; note = Description of Artificial Sequence: Synthetic oligonucleotide
ttctcttgcccattacttttt

SEQ ID NO: 31350 - RNA, 21 nt, synthetic construct
  source 1..21: mol_type = other RNA; note = Description of Artificial Sequence: Synthetic oligonucleotide
tatctcttgcccattactttt

SEQ ID NO: 31351 - RNA, 21 nt, synthetic construct
  source 1..21: mol_type = other RNA; note = Description of Artificial Sequence: Synthetic oligonucleotide
taatctcttgcccattacttt

SEQ ID NO: 31352 - RNA, 21 nt, synthetic construct
  source 1..21: mol_type = other RNA; note = Description of Artificial Sequence: Synthetic oligonucleotide
tcaatctcttgcccattactt

SEQ ID NO: 31353 - RNA, 21 nt, synthetic construct
  source 1..21: mol_type = other RNA; note = Description of Artificial Sequence: Synthetic oligonucleotide
tgcaatctcttgcccattatt

SEQ ID NO: 31354 - RNA, 21 nt, synthetic construct
  source 1..21: mol_type = other RNA; note = Description of Artificial Sequence: Synthetic oligonucleotide
ttgcaatctcttgcccatttt

SEQ ID NO: 31355 - RNA, 21 nt, synthetic construct
  source 1..21: mol_type = other RNA; note = Description of Artificial Sequence: Synthetic oligonucleotide
tatgcaatctcttgcccattt

SEQ ID NO: 31356 - RNA, 21 nt, synthetic construct
  source 1..21: mol_type = other RNA; note = Description of Artificial Sequence: Synthetic oligonucleotide
tgatgcaatctcttgcccatt

SEQ ID NO: 31357 - RNA, 21 nt, synthetic construct
  source 1..21: mol_type = other RNA; note = Description of Artificial Sequence: Synthetic oligonucleotide
ttgatgcaatctcttgccctt

SEQ ID NO: 31358 - RNA, 21 nt, synthetic construct
  source 1..21: mol_type = other RNA; note = Description of Artificial Sequence: Synthetic oligonucleotide
tatgatgcaatctcttgcctt

SEQ ID NO: 31359 - RNA, 21 nt, synthetic construct
  source 1..21: mol_type = other RNA; note = Description of Artificial Sequence: Synthetic oligonucleotide
ttatgatgcaatctcttgctt

SEQ ID NO: 31360 - RNA, 21 nt, synthetic construct
  source 1..21: mol_type = other RNA; note = Description of Artificial Sequence: Synthetic oligonucleotide
tgtatgatgcaatctcttgtt

SEQ ID NO: 31361 - RNA, 21 nt, synthetic construct
  source 1..21: mol_type = other RNA; note = Description of Artificial Sequence: Synthetic oligonucleotide
tagtatgatgcaatctctttt

SEQ ID NO: 31362 - RNA, 21 nt, synthetic construct
  source 1..21: mol_type = other RNA; note = Description of Artificial Sequence: Synthetic oligonucleotide
ttagtatgatgcaatctcttt

SEQ ID NO: 31363 - RNA, 21 nt, synthetic construct
  source 1..21: mol_type = other RNA; note = Description of Artificial Sequence: Synthetic oligonucleotide
tttagtatgatgcaatctctt

SEQ ID NO: 31364 - RNA, 21 nt, synthetic construct
  source 1..21: mol_type = other RNA; note = Description of Artificial Sequence: Synthetic oligonucleotide
tattagtatgatgcaatcttt

SEQ ID NO: 31365 - RNA, 21 nt, synthetic construct
  source 1..21: mol_type = other RNA; note = Description of Artificial Sequence: Synthetic oligonucleotide
taattagtatgatgcaatctt

SEQ ID NO: 31366 - RNA, 21 nt, synthetic construct
  source 1..21: mol_type = other RNA; note = Description of Artificial Sequence: Synthetic oligonucleotide
taaattagtatgatgcaattt

SEQ ID NO: 31367 - RNA, 21 nt, synthetic construct
  source 1..21: mol_type = other RNA; note = Description of Artificial Sequence: Synthetic oligonucleotide
ttaaattagtatgatgcaatt

SEQ ID NO: 31368 - RNA, 21 nt, synthetic construct
  source 1..21: mol_type = other RNA; note = Description of Artificial Sequence: Synthetic oligonucleotide
tctaaattagtatgatgcatt

SEQ ID NO: 31369 - RNA, 21 nt, synthetic construct
  source 1..21: mol_type = other RNA; note = Description of Artificial Sequence: Synthetic oligonucleotide
tactaaattagtatgatgctt

SEQ ID NO: 31370 - RNA, 21 nt, synthetic construct
  source 1..21: mol_type = other RNA; note = Description of Artificial Sequence: Synthetic oligonucleotide
ttactaaattagtatgatgtt

SEQ ID NO: 31371 - RNA, 21 nt, synthetic construct
  source 1..21: mol_type = other RNA; note = Description of Artificial Sequence: Synthetic oligonucleotide
tttactaaattagtatgattt

SEQ ID NO: 31372 - RNA, 21 nt, synthetic construct
  source 1..21: mol_type = other RNA; note = Description of Artificial Sequence: Synthetic oligonucleotide
tcttactaaattagtatgatt

SEQ ID NO: 31373 - RNA, 21 nt, synthetic construct
  source 1..21: mol_type = other RNA; note = Description of Artificial Sequence: Synthetic oligonucleotide
ttcttactaaattagtatgtt

SEQ ID NO: 31374 - RNA, 21 nt, synthetic construct
  source 1..21: mol_type = other RNA; note = Description of Artificial Sequence: Synthetic oligonucleotide
tttcttactaaattagtattt

SEQ ID NO: 31375 - RNA, 21 nt, synthetic construct
  source 1..21: mol_type = other RNA; note = Description of Artificial Sequence: Synthetic oligonucleotide
tgttcttactaaattagtatt

SEQ ID NO: 31376 - RNA, 21 nt, synthetic construct
  source 1..21: mol_type = other RNA; note = Description of Artificial Sequence: Synthetic oligonucleotide
tcgttcttactaaattagttt

SEQ ID NO: 31377 - RNA, 21 nt, synthetic construct
  source 1..21: mol_type = other RNA; note = Description of Artificial Sequence: Synthetic oligonucleotide
tacgttcttactaaattagtt

SEQ ID NO: 31378 - RNA, 21 nt, synthetic construct
  source 1..21: mol_type = other RNA; note = Description of Artificial Sequence: Synthetic oligonucleotide
taacgttcttactaaattatt

SEQ ID NO: 31379 - RNA, 21 nt, synthetic construct
  source 1..21: mol_type = other RNA; note = Description of Artificial Sequence: Synthetic oligonucleotide
tgaacgttcttactaaatttt

SEQ ID NO: 31380 - RNA, 21 nt, synthetic construct
  source 1..21: mol_type = other RNA; note = Description of Artificial Sequence: Synthetic oligonucleotide
tggaacgttcttactaaattt

SEQ ID NO: 31381 - RNA, 21 nt, synthetic construct
  source 1..21: mol_type = other RNA; note = Description of Artificial Sequence: Synthetic oligonucleotide
tgggaacgttcttactaaatt

SEQ ID NO: 31382 - RNA, 21 nt, synthetic construct
  source 1..21: mol_type = other RNA; note = Description of Artificial Sequence: Synthetic oligonucleotide
ttgggaacgttcttactaatt

SEQ ID NO: 31383 - RNA, 21 nt, synthetic construct
  source 1..21: mol_type = other RNA; note = Description of Artificial Sequence: Synthetic oligonucleotide
tttgggaacgttcttactatt

SEQ ID NO: 31384 - RNA, 21 nt, synthetic construct
  source 1..21: mol_type = other RNA; note = Description of Artificial Sequence: Synthetic oligonucleotide
ttttgggaacgttcttacttt

SEQ ID NO: 31385 - RNA, 21 nt, synthetic construct
  source 1..21: mol_type = other RNA; note = Description of Artificial Sequence: Synthetic oligonucleotide
tatttgggaacgttcttactt

SEQ ID NO: 31386 - RNA, 21 nt, synthetic construct
  source 1..21: mol_type = other RNA; note = Description of Artificial Sequence: Synthetic oligonucleotide
tcatttgggaacgttcttatt

SEQ ID NO: 31387 - RNA, 21 nt, synthetic construct
  source 1..21: mol_type = other RNA; note = Description of Artificial Sequence: Synthetic oligonucleotide
tacatttgggaacgttctttt

SEQ ID NO: 31388 - RNA, 21 nt, synthetic construct
  source 1..21: mol_type = other RNA; note = Description of Artificial Sequence: Synthetic oligonucleotide
taacatttgggaacgttcttt

SEQ ID NO: 31389 - RNA, 21 nt, synthetic construct
  source 1..21: mol_type = other RNA; note = Description of Artificial Sequence: Synthetic oligonucleotide
tcaacatttgggaacgttctt

SEQ ID NO: 31390 - RNA, 21 nt, synthetic construct
  source 1..21: mol_type = other RNA; note = Description of Artificial Sequence: Synthetic oligonucleotide
tacaacatttgggaacgtttt

SEQ ID NO: 31391 - RNA, 21 nt, synthetic construct
  source 1..21: mol_type = other RNA; note = Description of Artificial Sequence: Synthetic oligonucleotide
ttacaacatttgggaacgttt

SEQ ID NO: 31392 - RNA, 21 nt, synthetic construct
  source 1..21: mol_type = other RNA; note = Description of Artificial Sequence: Synthetic oligonucleotide
tttacaacatttgggaacgtt

SEQ ID NO: 31393 - RNA, 21 nt, synthetic construct
  source 1..21: mol_type = other RNA; note = Description of Artificial Sequence: Synthetic oligonucleotide
tgttacaacatttgggaactt

SEQ ID NO: 31394 - RNA, 21 nt, synthetic construct
  source 1..21: mol_type = other RNA; note = Description of Artificial Sequence: Synthetic oligonucleotide
ttgttacaacatttgggaatt

SEQ ID NO: 31395 - RNA, 21 nt, synthetic construct
  source 1..21: mol_type = other RNA; note = Description of Artificial Sequence: Synthetic oligonucleotide
tttgttacaacatttgggatt

SEQ ID NO: 31396 - RNA, 21 nt, synthetic construct
  source 1..21: mol_type = other RNA; note = Description of Artificial Sequence: Synthetic oligonucleotide
tattgttacaacatttgggtt

SEQ ID NO: 31397 - RNA, 21 nt, synthetic construct
  source 1..21: mol_type = other RNA; note = Description of Artificial Sequence: Synthetic oligonucleotide
tcattgttacaacatttggtt

SEQ ID NO: 31398 - RNA, 21 nt, synthetic construct
  source 1..21: mol_type = other RNA; note = Description of Artificial Sequence: Synthetic oligonucleotide
tacattgttacaacatttgtt

SEQ ID NO: 31399 - RNA, 21 nt, synthetic construct
  source 1..21: mol_type = other RNA; note = Description of Artificial Sequence: Synthetic oligonucleotide
tcacattgttacaacattttt

SEQ ID NO: 31400 - RNA, 21 nt, synthetic construct
  source 1..21: mol_type = other RNA; note = Description of Artificial Sequence: Synthetic oligonucleotide
tccacattgttacaacatttt

SEQ ID NO: 31401 - RNA, 21 nt, synthetic construct
  source 1..21: mol_type = other RNA; note = Description of Artificial Sequence: Synthetic oligonucleotide
ttccacattgttacaacattt

SEQ ID NO: 31402 - RNA, 21 nt, synthetic construct
  source 1..21: mol_type = other RNA; note = Description of Artificial Sequence: Synthetic oligonucleotide
tatccacattgttacaacatt

SEQ ID NO: 31403 - RNA, 21 nt, synthetic construct
  source 1..21: mol_type = other RNA; note = Description of Artificial Sequence: Synthetic oligonucleotide
tgatccacattgttacaactt

SEQ ID NO: 31404 - RNA, 21 nt, synthetic construct
  source 1..21: mol_type = other RNA; note = Description of Artificial Sequence: Synthetic oligonucleotide
ttgatccacattgttacaatt

SEQ ID NO: 31405 - RNA, 21 nt, synthetic construct
  source 1..21: mol_type = other RNA; note = Description of Artificial Sequence: Synthetic oligonucleotide
tatgatccacattgttacatt

SEQ ID NO: 31406 - RNA, 21 nt, synthetic construct
  source 1..21: mol_type = other RNA; note = Description of Artificial Sequence: Synthetic oligonucleotide
ttatgatccacattgttactt

SEQ ID NO: 31407 - RNA, 21 nt, synthetic construct
  source 1..21: mol_type = other RNA; note = Description of Artificial Sequence: Synthetic oligonucleotide
tgtatgatccacattgttatt

SEQ ID NO: 31408 - RNA, 21 nt, synthetic construct
  source 1..21: mol_type = other RNA; note = Description of Artificial Sequence: Synthetic oligonucleotide
ttgtatgatccacattgtttt

SEQ ID NO: 31409 - RNA, 21 nt, synthetic construct
  source 1..21: mol_type = other RNA; note = Description of Artificial Sequence: Synthetic oligonucleotide
tatgtatgatccacattgttt

SEQ ID NO: 31410 - RNA, 21 nt, synthetic construct
  source 1..21: mol_type = other RNA; note = Description of Artificial Sequence: Synthetic oligonucleotide
tgatgtatgatccacattgtt

SEQ ID NO: 31411 - RNA, 21 nt, synthetic construct
  source 1..21: mol_type = other RNA; note = Description of Artificial Sequence: Synthetic oligonucleotide
tagatgtatgatccacatttt

SEQ ID NO: 31412 - RNA, 21 nt, synthetic construct
  source 1..21: mol_type = other RNA; note = Description of Artificial Sequence: Synthetic oligonucleotide
tgagatgtatgatccacattt

SEQ ID NO: 31413 - RNA, 21 nt, synthetic construct
  source 1..21: mol_type = other RNA; note = Description of Artificial Sequence: Synthetic oligonucleotide
tagagatgtatgatccacatt

SEQ ID NO: 31414 - RNA, 21 nt, synthetic construct
  source 1..21: mol_type = other RNA; note = Description of Artificial Sequence: Synthetic oligonucleotide
tcagagatgtatgatccactt

SEQ ID NO: 31415 - RNA, 21 nt, synthetic construct
  source 1..21: mol_type = other RNA; note = Description of Artificial Sequence: Synthetic oligonucleotide
tccagagatgtatgatccatt

SEQ ID NO: 31416 - RNA, 21 nt, synthetic construct
  source 1..21: mol_type = other RNA; note = Description of Artificial Sequence: Synthetic oligonucleotide
taccagagatgtatgatcctt

SEQ ID NO: 31417 - RNA, 21 nt, synthetic construct
  source 1..21: mol_type = other RNA; note = Description of Artificial Sequence: Synthetic oligonucleotide
taaccagagatgtatgatctt

SEQ ID NO: 31418 - RNA, 21 nt, synthetic construct
  source 1..21: mol_type = other RNA; note = Description of Artificial Sequence: Synthetic oligonucleotide
taaaccagagatgtatgattt

SEQ ID NO: 31419 - RNA, 21 nt, synthetic construct
  source 1..21: mol_type = other RNA; note = Description of Artificial Sequence: Synthetic oligonucleotide
taaaaccagagatgtatgatt

SEQ ID NO: 31420 - RNA, 21 nt, synthetic construct
  source 1..21: mol_type = other RNA; note = Description of Artificial Sequence: Synthetic oligonucleotide
taaaaaccagagatgtatgtt

SEQ ID NO: 31421 - RNA, 21 nt, synthetic construct
  source 1..21: mol_type = other RNA; note = Description of Artificial Sequence: Synthetic oligonucleotide
taaaaaaccagagatgtattt

SEQ ID NO: 31422 - RNA, 21 nt, synthetic construct
  source 1..21: mol_type = other RNA; note = Description of Artificial Sequence: Synthetic oligonucleotide
ttaaaaaaccagagatgtatt

SEQ ID NO: 31423 - RNA, 21 nt, synthetic construct
  source 1..21: mol_type = other RNA; note = Description of Artificial Sequence: Synthetic oligonucleotide
tttaaaaaaccagagatgttt

SEQ ID NO: 31424 - RNA, 21 nt, synthetic construct
  source 1..21: mol_type = other RNA; note = Description of Artificial Sequence: Synthetic oligonucleotide
ttttaaaaaaccagagatgtt

SEQ ID NO: 31425 - RNA, 21 nt, synthetic construct
  source 1..21: mol_type = other RNA; note = Description of Artificial Sequence: Synthetic oligonucleotide
tatttaaaaaaccagagattt

SEQ ID NO: 31426 - RNA, 21 nt, synthetic construct
  source 1..21: mol_type = other RNA; note = Description of Artificial Sequence: Synthetic oligonucleotide
tcatttaaaaaaccagagatt

SEQ ID NO: 31427 - RNA, 21 nt, synthetic construct
  source 1..21: mol_type = other RNA; note = Description of Artificial Sequence: Synthetic oligonucleotide
tacatttaaaaaaccagagtt

SEQ ID NO: 31428 - RNA, 21 nt, synthetic construct
  source 1..21: mol_type = other RNA; note = Description of Artificial Sequence: Synthetic oligonucleotide
ttacatttaaaaaaccagatt

SEQ ID NO: 31429 - RNA, 21 nt, synthetic construct
  source 1..21: mol_type = other RNA; note = Description of Artificial Sequence: Synthetic oligonucleotide
tatacatttaaaaaaccagtt

SEQ ID NO: 31430 - RNA, 21 nt, synthetic construct
  source 1..21: mol_type = other RNA; note = Description of Artificial Sequence: Synthetic oligonucleotide
taatacatttaaaaaaccatt

SEQ ID NO: 31431 - RNA, 21 nt, synthetic construct
  source 1..21: mol_type = other RNA; note = Description of Artificial Sequence: Synthetic oligonucleotide
tcaatacatttaaaaaacctt

SEQ ID NO: 31432 - RNA, 21 nt, synthetic construct
  source 1..21: mol_type = other RNA; note = Description of Artificial Sequence: Synthetic oligonucleotide
ttcaatacatttaaaaaactt

SEQ ID NO: 31433 - RNA, 21 nt, synthetic construct
  source 1..21: mol_type = other RNA; note = Description of Artificial Sequence: Synthetic oligonucleotide
tctcaatacatttaaaaaatt

SEQ ID NO: 31434 - RNA, 21 nt, synthetic construct
  source 1..21: mol_type = other RNA; note = Description of Artificial Sequence: Synthetic oligonucleotide
tcctcaatacatttaaaaatt

SEQ ID NO: 31435 - RNA, 21 nt, synthetic construct
  source 1..21: mol_type = other RNA; note = Description of Artificial Sequence: Synthetic oligonucleotide
tgcctcaatacatttaaaatt

SEQ ID NO: 31436 - RNA, 21 nt, synthetic construct
  source 1..21: mol_type = other RNA; note = Description of Artificial Sequence: Synthetic oligonucleotide
tagcctcaatacatttaaatt

SEQ ID NO: 31437 - RNA, 21 nt, synthetic construct
  source 1..21: mol_type = other RNA; note = Description of Artificial Sequence: Synthetic oligonucleotide
taagcctcaatacatttaatt

SEQ ID NO: 31438 - RNA, 21 nt, synthetic construct
  source 1..21: mol_type = other RNA; note = Description of Artificial Sequence: Synthetic oligonucleotide
taaagcctcaatacatttatt

SEQ ID NO: 31439 - RNA, 21 nt, synthetic construct
  source 1..21: mol_type = other RNA; note = Description of Artificial Sequence: Synthetic oligonucleotide
tgaaagcctcaatacattttt

SEQ ID NO: 31440 - RNA, 21 nt, synthetic construct
  source 1..21: mol_type = other RNA; note = Description of Artificial Sequence: Synthetic oligonucleotide
tagaaagcctcaatacatttt

SEQ ID NO: 31441 - RNA, 21 nt, synthetic construct
  source 1..21: mol_type = other RNA; note = Description of Artificial Sequence: Synthetic oligonucleotide
taagaaagcctcaatacattt

SEQ ID NO: 31442 - RNA, 21 nt, synthetic construct
  source 1..21: mol_type = other RNA; note = Description of Artificial Sequence: Synthetic oligonucleotide
tcaagaaagcctcaatacatt

SEQ ID NO: 31443 - RNA, 21 nt, synthetic construct
  source 1..21: mol_type = other RNA; note = Description of Artificial Sequence: Synthetic oligonucleotide
tccaagaaagcctcaatactt

SEQ ID NO: 31444 - RNA, 21 nt, synthetic construct
  source 1..21: mol_type = other RNA; note = Description of Artificial Sequence: Synthetic oligonucleotide
taccaagaaagcctcaatatt

SEQ ID NO: 31445 - RNA, 21 nt, synthetic construct
  source 1..21: mol_type = other RNA; note = Description of Artificial Sequence: Synthetic oligonucleotide
tcaccaagaaagcctcaattt

SEQ ID NO: 31446 - RNA, 21 nt, synthetic construct
  source 1..21: mol_type = other RNA; note = Description of Artificial Sequence: Synthetic oligonucleotide
tccaccaagaaagcctcaatt

SEQ ID NO: 31447 - RNA, 21 nt, synthetic construct
  source 1..21: mol_type = other RNA; note = Description of Artificial Sequence: Synthetic oligonucleotide
ttccaccaagaaagcctcatt

SEQ ID NO: 31448 - RNA, 21 nt, synthetic construct
  source 1..21: mol_type = other RNA; note = Description of Artificial Sequence: Synthetic oligonucleotide
tgtccaccaagaaagcctctt

SEQ ID NO: 31449 - RNA, 21 nt, synthetic construct
  source 1..21: mol_type = other RNA; note = Description of Artificial Sequence: Synthetic oligonucleotide
tagtccaccaagaaagccttt

SEQ ID NO: 31450 - RNA, 21 nt, synthetic construct
  source 1..21: mol_type = other RNA; note = Description of Artificial Sequence: Synthetic oligonucleotide
ttagtccaccaagaaagcctt

SEQ ID NO: 31451 - RNA, 21 nt, synthetic construct
  source 1..21: mol_type = other RNA; note = Description of Artificial Sequence: Synthetic oligonucleotide
tctagtccaccaagaaagctt

SEQ ID NO: 31452 - RNA, 21 nt, synthetic construct
  source 1..21: mol_type = other RNA; note = Description of Artificial Sequence: Synthetic oligonucleotide
tactagtccaccaagaaagtt

SEQ ID NO: 31453 - RNA, 21 nt, synthetic construct
  source 1..21: mol_type = other RNA; note = Description of Artificial Sequence: Synthetic oligonucleotide
ttactagtccaccaagaaatt

SEQ ID NO: 31454 - RNA, 21 nt, synthetic construct
  source 1..21: mol_type = other RNA; note = Description of Artificial Sequence: Synthetic oligonucleotide
tatactagtccaccaagaatt

SEQ ID NO: 31455 - RNA, 21 nt, synthetic construct
  source 1..21: mol_type = other RNA; note = Description of Artificial Sequence: Synthetic oligonucleotide
ttatactagtccaccaagatt

SEQ ID NO: 31456 - RNA, 21 nt, synthetic construct
  source 1..21: mol_type = other RNA; note = Description of Artificial Sequence: Synthetic oligonucleotide
tctatactagtccaccaagtt

SEQ ID NO: 31457 - RNA, 21 nt, synthetic construct
  source 1..21: mol_type = other RNA; note = Description of Artificial Sequence: Synthetic oligonucleotide
tactatactagtccaccaatt

SEQ ID NO: 31458 - RNA, 21 nt, synthetic construct
  source 1..21: mol_type = other RNA; note = Description of Artificial Sequence: Synthetic oligonucleotide
ttactatactagtccaccatt

SEQ ID NO: 31459 - RNA, 21 nt, synthetic construct
  source 1..21: mol_type = other RNA; note = Description of Artificial Sequence: Synthetic oligonucleotide
tatactatactagtccacctt

SEQ ID NO: 31460 - RNA, 21 nt, synthetic construct
  source 1..21: mol_type = other RNA; note = Description of Artificial Sequence: Synthetic oligonucleotide
ttatactatactagtccactt

SEQ ID NO: 31461 - RNA, 21 nt, synthetic construct
  source 1..21: mol_type = other RNA; note = Description of Artificial Sequence: Synthetic oligonucleotide
tgtatactatactagtccatt

SEQ ID NO: 31462 - RNA, 21 nt, synthetic construct
  source 1..21: mol_type = other RNA; note = Description of Artificial Sequence: Synthetic oligonucleotide
tcgtatactatactagtcctt

SEQ ID NO: 31463 - RNA, 21 nt, synthetic construct
  source 1..21: mol_type = other RNA; note = Description of Artificial Sequence: Synthetic oligonucleotide
tccgtatactatactagtctt

SEQ ID NO: 31464 - RNA, 21 nt, synthetic construct
  source 1..21: mol_type = other RNA; note = Description of Artificial Sequence: Synthetic oligonucleotide
taccgtatactatactagttt

SEQ ID NO: 31465 - RNA, 21 nt, synthetic construct
  source 1..21: mol_type = other RNA; note = Description of Artificial Sequence: Synthetic oligonucleotide
tgaccgtatactatactagtt

SEQ ID NO: 31466 - RNA, 21 nt, synthetic construct
  source 1..21: mol_type = other RNA; note = Description of Artificial Sequence: Synthetic oligonucleotide
ttgaccgtatactatactatt

SEQ ID NO: 31467 - RNA, 21 nt, synthetic construct
  source 1..21: mol_type = other RNA; note = Description of Artificial Sequence: Synthetic oligonucleotide
tctgaccgtatactatacttt

SEQ ID NO: 31468 - RNA, 21 nt, synthetic construct
  source 1..21: mol_type = other RNA; note = Description of Artificial Sequence: Synthetic oligonucleotide
tactgaccgtatactatactt

SEQ ID NO: 31469 - RNA, 21 nt, synthetic construct
  source 1..21: mol_type = other RNA; note = Description of Artificial Sequence: Synthetic oligonucleotide
taactgaccgtatactatatt

SEQ ID NO: 31470 - RNA, 21 nt, synthetic construct
  source 1..21: mol_type = other RNA; note = Description of Artificial Sequence: Synthetic oligonucleotide
ttaactgaccgtatactattt

SEQ ID NO: 31471 - RNA, 21 nt, synthetic construct
  source 1..21: mol_type = other RNA; note = Description of Artificial Sequence: Synthetic oligonucleotide
tataactgaccgtatactatt

SEQ ID NO: 31472 - RNA, 21 nt, synthetic construct
  source 1..21: mol_type = other RNA; note = Description of Artificial Sequence: Synthetic oligonucleotide
tcataactgaccgtatacttt

SEQ ID NO: 31473 - RNA, 21 nt, synthetic construct
  source 1..21: mol_type = other RNA; note = Description of Artificial Sequence: Synthetic oligonucleotide
tacataactgaccgtatactt

SEQ ID NO: 31474 - RNA, 21 nt, synthetic construct
  source 1..21: mol_type = other RNA; note = Description of Artificial Sequence: Synthetic oligonucleotide
tgacataactgaccgtatatt

SEQ ID NO: 31475 - RNA, 21 nt, synthetic construct
  source 1..21: mol_type = other RNA; note = Description of Artificial Sequence: Synthetic oligonucleotide
ttgacataactgaccgtattt

SEQ ID NO: 31476 - RNA, 21 nt, synthetic construct
  source 1..21: mol_type = other RNA; note = Description of Artificial Sequence: Synthetic oligonucleotide
tttgacataactgaccgtatt

SEQ ID NO: 31477 - RNA, 21 nt, synthetic construct
  source 1..21: mol_type = other RNA; note = Description of Artificial Sequence: Synthetic oligonucleotide
tattgacataactgaccgttt

SEQ ID NO: 31478 - RNA, 21 nt, synthetic construct
  source 1..21: mol_type = other RNA; note = Description of Artificial Sequence: Synthetic oligonucleotide
tcattgacataactgaccgtt

SEQ ID NO: 31479 - RNA, 21 nt, synthetic construct
  source 1..21: mol_type = other RNA; note = Description of Artificial Sequence: Synthetic oligonucleotide
tacattgacataactgacctt

SEQ ID NO: 31480 - RNA, 21 nt, synthetic construct
  source 1..21: mol_type = other RNA; note = Description of Artificial Sequence: Synthetic oligonucleotide
taacattgacataactgactt

SEQ ID NO: 31481 - RNA, 21 nt, synthetic construct
  source 1..21: mol_type = other RNA; note = Description of Artificial Sequence: Synthetic oligonucleotide
taaacattgacataactgatt

SEQ ID NO: 31482 - RNA, 21 nt, synthetic construct
  source 1..21: mol_type = other RNA; note = Description of Artificial Sequence: Synthetic oligonucleotide
tgaaacattgacataactgtt

SEQ ID NO: 31483 - RNA, 21 nt, synthetic construct
  source 1..21: mol_type = other RNA; note = Description of Artificial Sequence: Synthetic oligonucleotide
ttgaaacattgacataacttt

SEQ ID NO: 31484 - RNA, 21 nt, synthetic construct
  source 1..21: mol_type = other RNA; note = Description of Artificial Sequence: Synthetic oligonucleotide
tatgaaacattgacataactt

SEQ ID NO: 31485 - RNA, 21 nt, synthetic construct
  source 1..21: mol_type = other RNA; note = Description of Artificial Sequence: Synthetic oligonucleotide
tcatgaaacattgacataatt

SEQ ID NO: 31486 - RNA, 21 nt, synthetic construct
  source 1..21: mol_type = other RNA; note = Description of Artificial Sequence: Synthetic oligonucleotide
tccatgaaacattgacatatt

SEQ ID NO: 31487 - RNA, 21 nt, synthetic construct
  source 1..21: mol_type = other RNA; note = Description of Artificial Sequence: Synthetic oligonucleotide
taccatgaaacattgacattt

SEQ ID NO: 31488 - RNA, 21 nt, synthetic construct
  source 1..21: mol_type = other RNA; note = Description of Artificial Sequence: Synthetic oligonucleotide
tgaccatgaaacattgacatt

SEQ ID NO: 31489 - RNA, 21 nt, synthetic construct
  source 1..21: mol_type = other RNA; note = Description of Artificial Sequence: Synthetic oligonucleotide
ttgaccatgaaacattgactt

SEQ ID NO: 31490 - RNA, 21 nt, synthetic construct
  source 1..21: mol_type = other RNA; note = Description of Artificial Sequence: Synthetic oligonucleotide
tttgaccatgaaacattgatt

SEQ ID NO: 31491 - RNA, 21 nt, synthetic construct
  source 1..21: mol_type = other RNA; note = Description of Artificial Sequence: Synthetic oligonucleotide
tattgaccatgaaacattgtt

SEQ ID NO: 31492 - RNA, 21 nt, synthetic construct
  source 1..21: mol_type = other RNA; note = Description of Artificial Sequence: Synthetic oligonucleotide
ttattgaccatgaaacatttt

SEQ ID NO: 31493 - RNA, 21 nt, synthetic construct
  source 1..21: mol_type = other RNA; note = Description of Artificial Sequence: Synthetic oligonucleotide
tttattgaccatgaaacattt

SEQ ID NO: 31494 - RNA, 21 nt, synthetic construct
  source 1..21: mol_type = other RNA; note = Description of Artificial Sequence: Synthetic oligonucleotide
ttttattgaccatgaaacatt

SEQ ID NO: 31495 - RNA, 21 nt, synthetic construct
  source 1..21: mol_type = other RNA; note = Description of Artificial Sequence: Synthetic oligonucleotide
tttttattgaccatgaaactt

SEQ ID NO: 31496 - RNA, 21 nt, synthetic construct
  source 1..21: mol_type = other RNA; note = Description of Artificial Sequence: Synthetic oligonucleotide
ttttttattgaccatgaaatt

SEQ ID NO: 31497 - RNA, 21 nt, synthetic construct
  source 1..21: mol_type = other RNA; note = Description of Artificial Sequence: Synthetic oligonucleotide
tctttttattgaccatgaatt

SEQ ID NO: 31498 - RNA, 21 nt, synthetic construct
  source 1..21: mol_type = other RNA; note = Description of Artificial Sequence: Synthetic oligonucleotide
tcctttttattgaccatgatt

SEQ ID NO: 31499 - RNA, 21 nt, synthetic construct
  source 1..21: mol_type = other RNA; note = Description of Artificial Sequence: Synthetic oligonucleotide
ttcctttttattgaccatgtt

SEQ ID NO: 31500 - RNA, 21 nt, synthetic construct
  source 1..21: mol_type = other RNA; note = Description of Artificial Sequence: Synthetic oligonucleotide
tttcctttttattgaccattt

SEQ ID NO: 31501 - RNA, 21 nt, synthetic construct
  source 1..21: mol_type = other RNA; note = Description of Artificial Sequence: Synthetic oligonucleotide
tcttcctttttattgaccatt

SEQ ID NO: 31502 - RNA, 21 nt, synthetic construct
  source 1..21: mol_type = other RNA; note = Description of Artificial Sequence: Synthetic oligonucleotide
tacttcctttttattgacctt

SEQ ID NO: 31503 - RNA, 21 nt, synthetic construct
  source 1..21: mol_type = other RNA; note = Description of Artificial Sequence: Synthetic oligonucleotide
taacttcctttttattgactt

SEQ ID NO: 31504 - RNA, 21 nt, synthetic construct
  source 1..21: mol_type = other RNA; note = Description of Artificial Sequence: Synthetic oligonucleotide
tcaacttcctttttattgatt

SEQ ID NO: 31505 - RNA, 21 nt, synthetic construct
  source 1..21: mol_type = other RNA; note = Description of Artificial Sequence: Synthetic oligonucleotide
tgcaacttcctttttattgtt

SEQ ID NO: 31506 - RNA, 21 nt, synthetic construct
  source 1..21: mol_type = other RNA; note = Description of Artificial Sequence: Synthetic oligonucleotide
ttgcaacttcctttttatttt

SEQ ID NO: 31507 - RNA, 21 nt, synthetic construct
  source 1..21: mol_type = other RNA; note = Description of Artificial Sequence: Synthetic oligonucleotide
tttgcaacttcctttttattt

SEQ ID NO: 31508 - RNA, 21 nt, synthetic construct
  source 1..21: mol_type = other RNA; note = Description of Artificial Sequence: Synthetic oligonucleotide
ttttgcaacttcctttttatt

SEQ ID NO: 31509 - RNA, 21 nt, synthetic construct
  source 1..21: mol_type = other RNA; note = Description of Artificial Sequence: Synthetic oligonucleotide
tatttgcaacttccttttttt

SEQ ID NO: 31510 - RNA, 21 nt, synthetic construct
  source 1..21: mol_type = other RNA; note = Description of Artificial Sequence: Synthetic oligonucleotide
taatttgcaacttcctttttt

SEQ ID NO: 31511 - RNA, 21 nt, synthetic construct
  source 1..21: mol_type = other RNA; note = Description of Artificial Sequence: Synthetic oligonucleotide
tcaatttgcaacttccttttt

SEQ ID NO: 31512 - RNA, 21 nt, synthetic construct
  source 1..21: mol_type = other RNA; note = Description of Artificial Sequence: Synthetic oligonucleotide
tacaatttgcaacttcctttt

SEQ ID NO: 31513 - RNA, 21 nt, synthetic construct
  source 1..21: mol_type = other RNA; note = Description of Artificial Sequence: Synthetic oligonucleotide
tcacaatttgcaacttccttt

SEQ ID NO: 31514 - RNA, 21 nt, synthetic construct
  source 1..21: mol_type = other RNA; note = Description of Artificial Sequence: Synthetic oligonucleotide
tagttggagtctccctgattt

SEQ ID NO: 31515 - RNA, 21 nt, synthetic construct
  source 1..21: mol_type = other RNA; note = Description of Artificial Sequence: Synthetic oligonucleotide
taagttggagtctccctgatt

SEQ ID NO: 31516 - RNA, 21 nt, synthetic construct
  source 1..21: mol_type = other RNA; note = Description of Artificial Sequence: Synthetic oligonucleotide
ttaagttggagtctccctgtt

SEQ ID NO: 31517 - RNA, 21 nt, synthetic construct
  source 1..21: mol_type = other RNA; note = Description of Artificial Sequence: Synthetic oligonucleotide
tttaagttggagtctcccttt

SEQ ID NO: 31518 - RNA, 21 nt, synthetic construct
  source 1..21: mol_type = other RNA; note = Description of Artificial Sequence: Synthetic oligonucleotide
tcttaagttggagtctccctt

SEQ ID NO: 31519 - RNA, 21 nt, synthetic construct
  source 1..21: mol_type = other RNA; note = Description of Artificial Sequence: Synthetic oligonucleotide
tccttaagttggagtctcctt

SEQ ID NO: 31520 - RNA, 21 nt, synthetic construct
  source 1..21: mol_type = other RNA; note = Description of Artificial Sequence: Synthetic oligonucleotide
tgccttaagttggagtctctt

SEQ ID NO: 31521 - RNA, 21 nt, synthetic construct
  source 1..21: mol_type = other RNA; note = Description of Artificial Sequence: Synthetic oligonucleotide
ttgccttaagttggagtcttt

SEQ ID NO: 31522 - RNA, 21 nt, synthetic construct
  source 1..21: mol_type = other RNA; note = Description of Artificial Sequence: Synthetic oligonucleotide
tttgccttaagttggagtctt

SEQ ID NO: 31523 - RNA, 21 nt, synthetic construct
  source 1..21: mol_type = other RNA; note = Description of Artificial Sequence: Synthetic oligonucleotide
tgttgccttaagttggagttt

SEQ ID NO: 31524 - RNA, 21 nt, synthetic construct
  source 1..21: mol_type = other RNA; note = Description of Artificial Sequence: Synthetic oligonucleotide
ttgttgccttaagttggagtt

SEQ ID NO: 31525 - RNA, 21 nt, synthetic construct
  source 1..21: mol_type = other RNA; note = Description of Artificial Sequence: Synthetic oligonucleotide
tctgttgccttaagttggatt

SEQ ID NO: 31526 - RNA, 21 nt, synthetic construct
  source 1..21: mol_type = other RNA; note = Description of Artificial Sequence: Synthetic oligonucleotide
tgctgttgccttaagttggtt

SEQ ID NO: 31527 - RNA, 21 nt, synthetic construct
  source 1..21: mol_type = other RNA; note = Description of Artificial Sequence: Synthetic oligonucleotide
ttgctgttgccttaagttgtt

SEQ ID NO: 31528 - RNA, 21 nt, synthetic construct
  source 1..21: mol_type = other RNA; note = Description of Artificial Sequence: Synthetic oligonucleotide
tatgctgttgccttaagtttt

SEQ ID NO: 31529 - RNA, 21 nt, synthetic construct
  source 1..21: mol_type = other RNA; note = Description of Artificial Sequence: Synthetic oligonucleotide
tcatgctgttgccttaagttt

SEQ ID NO: 31530 - RNA, 21 nt, synthetic construct
  source 1..21: mol_type = other RNA; note = Description of Artificial Sequence: Synthetic oligonucleotide
tccatgctgttgccttaagtt

SEQ ID NO: 31531 - RNA, 21 nt, synthetic construct
  source 1..21: mol_type = other RNA; note = Description of Artificial Sequence: Synthetic oligonucleotide
tcccatgctgttgccttaatt

SEQ ID NO: 31532 - RNA, 21 nt, synthetic construct
  source 1..21: mol_type = other RNA; note = Description of Artificial Sequence: Synthetic oligonucleotide
tacccatgctgttgccttatt

SEQ ID NO: 31533 - RNA, 21 nt, synthetic construct
  source 1..21: mol_type = other RNA; note = Description of Artificial Sequence: Synthetic oligonucleotide
tcacccatgctgttgcctttt

SEQ ID NO: 31534 - RNA, 21 nt, synthetic construct
  source 1..21: mol_type = other RNA; note = Description of Artificial Sequence: Synthetic oligonucleotide
ttcacccatgctgttgccttt

SEQ ID NO: 31535 - RNA, 21 nt, synthetic construct
  source 1..21: mol_type = other RNA; note = Description of Artificial Sequence: Synthetic oligonucleotide
tttcacccatgctgttgcctt

SEQ ID NO: 31536 - RNA, 21 nt, synthetic construct
  source 1..21: mol_type = other RNA; note = Description of Artificial Sequence: Synthetic oligonucleotide
tattcacccatgctgttgctt

SEQ ID NO: 31537 - RNA, 21 nt, synthetic construct
  source 1..21: mol_type = other RNA; note = Description of Artificial Sequence: Synthetic oligonucleotide
ttattcacccatgctgttgtt

SEQ ID NO: 31538 - RNA, 21 nt, synthetic construct
  source 1..21: mol_type = other RNA; note = Description of Artificial Sequence: Synthetic oligonucleotide
tttattcacccatgctgtttt

SEQ ID NO: 31539 - RNA, 21 nt, synthetic construct
  source 1..21: mol_type = other RNA; note = Description of Artificial Sequence: Synthetic oligonucleotide
tcttattcacccatgctgttt

SEQ ID NO: 31540 - RNA, 21 nt, synthetic construct
  source 1..21: mol_type = other RNA; note = Description of Artificial Sequence: Synthetic oligonucleotide
tccttattcacccatgctgtt

SEQ ID NO: 31541 - RNA, 21 nt, synthetic construct
  source 1..21: mol_type = other RNA; note = Description of Artificial Sequence: Synthetic oligonucleotide
tcccttattcacccatgcttt

SEQ ID NO: 31542 - RNA, 21 nt, synthetic construct
  source 1..21: mol_type = other RNA; note = Description of Artificial Sequence: Synthetic oligonucleotide
tgcccttattcacccatgctt

SEQ ID NO: 31543 - RNA, 21 nt, synthetic construct
  source 1..21: mol_type = other RNA; note = Description of Artificial Sequence: Synthetic oligonucleotide
tagcccttattcacccatgtt

SEQ ID NO: 31544 - RNA, 21 nt, synthetic construct
  source 1..21: mol_type = other RNA; note = Description of Artificial Sequence: Synthetic oligonucleotide
taagcccttattcacccattt

SEQ ID NO: 31545 - RNA, 21 nt, synthetic construct
  source 1..21: mol_type = other RNA; note = Description of Artificial Sequence: Synthetic oligonucleotide
tgaagcccttattcacccatt

SEQ ID NO: 31546 - RNA, 21 nt, synthetic construct
  source 1..21: mol_type = other RNA; note = Description of Artificial Sequence: Synthetic oligonucleotide
tggaagcccttattcaccctt

SEQ ID NO: 31547 - RNA, 21 nt, synthetic construct
  source 1..21: mol_type = other RNA; note = Description of Artificial Sequence: Synthetic oligonucleotide
taggaagcccttattcacctt

SEQ ID NO: 31548 - RNA, 21 nt, synthetic construct
  source 1..21: mol_type = other RNA; note = Description of Artificial Sequence: Synthetic oligonucleotide
tcaggaagcccttattcactt

SEQ ID NO: 31549 - RNA, 21 nt, synthetic construct
  source 1..21: mol_type = other RNA; note = Description of Artificial Sequence: Synthetic oligonucleotide
tacaggaagcccttattcatt

SEQ ID NO: 31550 - RNA, 21 nt, synthetic construct
  source 1..21: mol_type = other RNA; note = Description of Artificial Sequence: Synthetic oligonucleotide
tcacaggaagcccttattctt

SEQ ID NO: 31551 - RNA, 21 nt, synthetic construct
  source 1..21: mol_type = other RNA; note = Description of Artificial Sequence: Synthetic oligonucleotide
tccacaggaagcccttatttt

SEQ ID NO: 31552 - RNA, 21 nt, synthetic construct
  source 1..21: mol_type = other RNA; note = Description of Artificial Sequence: Synthetic oligonucleotide
ttccacaggaagcccttattt

SEQ ID NO: 31553 - RNA, 21 nt, synthetic construct
  source 1..21: mol_type = other RNA; note = Description of Artificial Sequence: Synthetic oligonucleotide
tgtccacaggaagcccttatt

SEQ ID NO: 31554 - RNA, 21 nt, synthetic construct
  source 1..21: mol_type = other RNA; note = Description of Artificial Sequence: Synthetic oligonucleotide
tagtccacaggaagccctttt

SEQ ID NO: 31555 - RNA, 21 nt, synthetic construct
  source 1..21: mol_type = other RNA; note = Description of Artificial Sequence: Synthetic oligonucleotide
tcagtccacaggaagcccttt

SEQ ID NO: 31556 - RNA, 21 nt, synthetic construct
  source 1..21: mol_type = other RNA; note = Description of Artificial Sequence: Synthetic oligonucleotide
tccagtccacaggaagccctt

SEQ ID NO: 31557 - RNA, 21 nt, synthetic construct
  source 1..21: mol_type = other RNA; note = Description of Artificial Sequence: Synthetic oligonucleotide
tgccagtccacaggaagcctt

SEQ ID NO: 31558 - RNA, 21 nt, synthetic construct
  source 1..21: mol_type = other RNA; note = Description of Artificial Sequence: Synthetic oligonucleotide
ttgccagtccacaggaagctt

SEQ ID NO: 31559 - RNA, 21 nt, synthetic construct
  source 1..21: mol_type = other RNA; note = Description of Artificial Sequence: Synthetic oligonucleotide
tttgccagtccacaggaagtt

SEQ ID NO: 31560 - RNA, 21 nt, synthetic construct
  source 1..21: mol_type = other RNA; note = Description of Artificial Sequence: Synthetic oligonucleotide
tattgccagtccacaggaatt

SEQ ID NO: 31561 - RNA, 21 nt, synthetic construct
  source 1..21: mol_type = other RNA; note = Description of Artificial Sequence: Synthetic oligonucleotide
tcattgccagtccacaggatt

SEQ ID NO: 31562 - RNA, 21 nt, synthetic construct
  source 1..21: mol_type = other RNA; note = Description of Artificial Sequence: Synthetic oligonucleotide
ttcattgccagtccacaggtt

SEQ ID NO: 31563 - RNA, 21 nt, synthetic construct
  source 1..21: mol_type = other RNA; note = Description of Artificial Sequence: Synthetic oligonucleotide
tctcattgccagtccacagtt

SEQ ID NO: 31564 - RNA, 21 nt, synthetic construct
  source 1..21: mol_type = other RNA; note = Description of Artificial Sequence: Synthetic oligonucleotide
ttctcattgccagtccacatt

SEQ ID NO: 31565 - RNA, 21 nt, synthetic construct
  source 1..21: mol_type = other RNA; note = Description of Artificial Sequence: Synthetic oligonucleotide
tctctcattgccagtccactt

SEQ ID NO: 31566 - RNA, 21 nt, synthetic construct
  source 1..21: mol_type = other RNA; note = Description of Artificial Sequence: Synthetic oligonucleotide
tcctctcattgccagtccatt

SEQ ID NO: 31567 - RNA, 21 nt, synthetic construct
  source 1..21: mol_type = other RNA; note = Description of Artificial Sequence: Synthetic oligonucleotide
tgcctctcattgccagtcctt

SEQ ID NO: 31568 - RNA, 21 nt, synthetic construct
  source 1..21: mol_type = other RNA; note = Description of Artificial Sequence: Synthetic oligonucleotide
ttgcctctcattgccagtctt

SEQ ID NO: 31569 - RNA, 21 nt, synthetic construct
  source 1..21: mol_type = other RNA; note = Description of Artificial Sequence: Synthetic oligonucleotide
tttgcctctcattgccagttt

SEQ ID NO: 31570 - RNA, 21 nt, synthetic construct
  source 1..21: mol_type = other RNA; note = Description of Artificial Sequence: Synthetic oligonucleotide
ttttgcctctcattgccagtt

SEQ ID NO: 31571 - RNA, 21 nt, synthetic construct
  source 1..21: mol_type = other RNA; note = Description of Artificial Sequence: Synthetic oligonucleotide
tttttgcctctcattgccatt

SEQ ID NO: 31572 - RNA, 21 nt, synthetic construct
  source 1..21: mol_type = other RNA; note = Description of Artificial Sequence: Synthetic oligonucleotide
tgttttgcctctcattgcctt

SEQ ID NO: 31573 - RNA, 21 nt, synthetic construct
  source 1..21: mol_type = other RNA; note = Description of Artificial Sequence: Synthetic oligonucleotide
tggttttgcctctcattgctt

SEQ ID NO: 31574 - RNA, 21 nt, synthetic construct
  source 1..21: mol_type = other RNA; note = Description of Artificial Sequence: Synthetic oligonucleotide
taggttttgcctctcattgtt

SEQ ID NO: 31575 - RNA, 21 nt, synthetic construct
  source 1..21: mol_type = other RNA; note = Description of Artificial Sequence: Synthetic oligonucleotide
tcaggttttgcctctcatttt

SEQ ID NO: 31576 - RNA, 21 nt, synthetic construct
  source 1..21: mol_type = other RNA; note = Description of Artificial Sequence: Synthetic oligonucleotide
tccaggttttgcctctcattt

SEQ ID NO: 31577 - RNA, 21 nt, synthetic construct
  source 1..21: mol_type = other RNA; note = Description of Artificial Sequence: Synthetic oligonucleotide
taccaggttttgcctctcatt

SEQ ID NO: 31578 - RNA, 21 nt, synthetic construct
  source 1..21: mol_type = other RNA; note = Description of Artificial Sequence: Synthetic oligonucleotide
tcaccaggttttgcctctctt

SEQ ID NO: 31579 - RNA, 21 nt, synthetic construct
  source 1..21: mol_type = other RNA; note = Description of Artificial Sequence: Synthetic oligonucleotide
tgcaccaggttttgcctcttt

SEQ ID NO: 31580 - RNA, 21 nt, synthetic construct
  source 1..21: mol_type = other RNA; note = Description of Artificial Sequence: Synthetic oligonucleotide
tagcaccaggttttgcctctt

SEQ ID NO: 31581 - RNA, 21 nt, synthetic construct
  source 1..21: mol_type = other RNA; note = Description of Artificial Sequence: Synthetic oligonucleotide
taagcaccaggttttgccttt

SEQ ID NO: 31582 - RNA, 21 nt, synthetic construct
  source 1..21: mol_type = other RNA; note = Description of Artificial Sequence: Synthetic oligonucleotide
tcaagcaccaggttttgcctt

SEQ ID NO: 31583 - RNA, 21 nt, synthetic construct
  source 1..21: mol_type = other RNA; note = Description of Artificial Sequence: Synthetic oligonucleotide
ttcaagcaccaggttttgctt

SEQ ID NO: 31584 - RNA, 21 nt, synthetic construct
  source 1..21: mol_type = other RNA; note = Description of Artificial Sequence: Synthetic oligonucleotide
tctcaagcaccaggttttgtt

SEQ ID NO: 31585 - RNA, 21 nt, synthetic construct
  source 1..21: mol_type = other RNA; note = Description of Artificial Sequence: Synthetic oligonucleotide
tgctcaagcaccaggtttttt

SEQ ID NO: 31586 - RNA, 21 nt, synthetic construct
  source 1..21: mol_type = other RNA; note = Description of Artificial Sequence: Synthetic oligonucleotide
ttgctcaagcaccaggttttt

SEQ ID NO: 31587 - RNA, 21 nt, synthetic construct
  source 1..21: mol_type = other RNA; note = Description of Artificial Sequence: Synthetic oligonucleotide
tgtgctcaagcaccaggtttt

SEQ ID NO: 31588 - RNA, 21 nt, synthetic construct
  source 1..21: mol_type = other RNA; note = Description of Artificial Sequence: Synthetic oligonucleotide
tagtgctcaagcaccaggttt

SEQ ID NO: 31589 - RNA, 21 nt, synthetic construct
  source 1..21: mol_type = other RNA; note = Description of Artificial Sequence: Synthetic oligonucleotide
tcagtgctcaagcaccaggtt

SEQ ID NO: 31590 - RNA, 21 nt, synthetic construct
  source 1..21: mol_type = other RNA; note = Description of Artificial Sequence: Synthetic oligonucleotide
tccagtgctcaagcaccagtt

SEQ ID NO: 31591 - RNA, 21 nt, synthetic construct
  source 1..21: mol_type = other RNA; note = Description of Artificial Sequence: Synthetic oligonucleotide
tgccagtgctcaagcaccatt

SEQ ID NO: 31592 - RNA, 21 nt, synthetic construct
  source 1..21: mol_type = other RNA; note = Description of Artificial Sequence: Synthetic oligonucleotide
tggccagtgctcaagcacctt

SEQ ID NO: 31593 - RNA, 21 nt, synthetic construct
  source 1..21: mol_type = other RNA; note = Description of Artificial Sequence: Synthetic oligonucleotide
tgggccagtgctcaagcactt

SEQ ID NO: 31594 - RNA, 21 nt, synthetic construct
  source 1..21: mol_type = other RNA; note = Description of Artificial Sequence: Synthetic oligonucleotide
tggggccagtgctcaagcatt

SEQ ID NO: 31595 - RNA, 21 nt, synthetic construct
  source 1..21: mol_type = other RNA; note = Description of Artificial Sequence: Synthetic oligonucleotide
taggggccagtgctcaagctt

SEQ ID NO: 31596 - RNA, 21 nt, synthetic construct
  source 1..21: mol_type = other RNA; note = Description of Artificial Sequence: Synthetic oligonucleotide
ttaggggccagtgctcaagtt

SEQ ID NO: 31597 - RNA, 21 nt, synthetic construct
  source 1..21: mol_type = other RNA; note = Description of Artificial Sequence: Synthetic oligonucleotide
tttaggggccagtgctcaatt

SEQ ID NO: 31598 - RNA, 21 nt, synthetic construct
  source 1..21: mol_type = other RNA; note = Description of Artificial Sequence: Synthetic oligonucleotide
tcttaggggccagtgctcatt

SEQ ID NO: 31599 - RNA, 21 nt, synthetic construct
  source 1..21: mol_type = other RNA; note = Description of Artificial Sequence: Synthetic oligonucleotide
tccttaggggccagtgctctt

SEQ ID NO: 31600 - RNA, 21 nt, synthetic construct
  source 1..21: mol_type = other RNA; note = Description of Artificial Sequence: Synthetic oligonucleotide
tgccttaggggccagtgcttt

SEQ ID NO: 31601 - RNA, 21 nt, synthetic construct
  source 1..21: mol_type = other RNA; note = Description of Artificial Sequence: Synthetic oligonucleotide
ttgccttaggggccagtgctt

SEQ ID NO: 31602 - RNA, 21 nt, synthetic construct
  source 1..21: mol_type = other RNA; note = Description of Artificial Sequence: Synthetic oligonucleotide
tctgccttaggggccagtgtt

SEQ ID NO: 31603 - RNA, 21 nt, synthetic construct
  source 1..21: mol_type = other RNA; note = Description of Artificial Sequence: Synthetic oligonucleotide
tcctgccttaggggccagttt

SEQ ID NO: 31604 - RNA, 21 nt, synthetic construct
  source 1..21: mol_type = other RNA; note = Description of Artificial Sequence: Synthetic oligonucleotide
tgcctgccttaggggccagtt

SEQ ID NO: 31605 - RNA, 21 nt, synthetic construct
  source 1..21: mol_type = other RNA; note = Description of Artificial Sequence: Synthetic oligonucleotide
tggcctgccttaggggccatt

SEQ ID NO: 31606 - RNA, 21 nt, synthetic construct
  source 1..21: mol_type = other RNA; note = Description of Artificial Sequence: Synthetic oligonucleotide
taggcctgccttaggggcctt

SEQ ID NO: 31607 - RNA, 21 nt, synthetic construct
  source 1..21: mol_type = other RNA; note = Description of Artificial Sequence: Synthetic oligonucleotide
taaggcctgccttaggggctt

SEQ ID NO: 31608 - RNA, 21 nt, synthetic construct
  source 1..21: mol_type = other RNA; note = Description of Artificial Sequence: Synthetic oligonucleotide
ttaaggcctgccttaggggtt

SEQ ID NO: 31609 - RNA, 21 nt, synthetic construct
  source 1..21: mol_type = other RNA; note = Description of Artificial Sequence: Synthetic oligonucleotide
tgtaaggcctgccttagggtt

SEQ ID NO: 31610 - RNA, 21 nt, synthetic construct
  source 1..21: mol_type = other RNA; note = Description of Artificial Sequence: Synthetic oligonucleotide
ttgtaaggcctgccttaggtt

SEQ ID NO: 31611 - RNA, 21 nt, synthetic construct
  source 1..21: mol_type = other RNA; note = Description of Artificial Sequence: Synthetic oligonucleotide
tctgtaaggcctgccttagtt

SEQ ID NO: 31612 - RNA, 21 nt, synthetic construct
  source 1..21: mol_type = other RNA; note = Description of Artificial Sequence: Synthetic oligonucleotide
ttctgtaaggcctgccttatt

SEQ ID NO: 31613 - RNA, 21 nt, synthetic construct
  source 1..21: mol_type = other RNA; note = Description of Artificial Sequence: Synthetic oligonucleotide
tatctgtaaggcctgcctttt

SEQ ID NO: 31614 - RNA, 21 nt, synthetic construct
  source 1..21: mol_type = other RNA; note = Description of Artificial Sequence: Synthetic oligonucleotide
tgatctgtaaggcctgccttt

SEQ ID NO: 31615 - RNA, 21 nt, synthetic construct
  source 1..21: mol_type = other RNA; note = Description of Artificial Sequence: Synthetic oligonucleotide
tagatctgtaaggcctgcctt

SEQ ID NO: 31616 - RNA, 21 nt, synthetic construct
  source 1..21: mol_type = other RNA; note = Description of Artificial Sequence: Synthetic oligonucleotide
tgagatctgtaaggcctgctt

SEQ ID NO: 31617 - RNA, 21 nt, synthetic construct
  source 1..21: mol_type = other RNA; note = Description of Artificial Sequence: Synthetic oligonucleotide
tagagatctgtaaggcctgtt

SEQ ID NO: 31618 - RNA, 21 nt, synthetic construct
  source 1..21: mol_type = other RNA; note = Description of Artificial Sequence: Synthetic oligonucleotide
taagagatctgtaaggccttt

SEQ ID NO: 31619 - RNA, 21 nt, synthetic construct
  source 1..21: mol_type = other RNA; note = Description of Artificial Sequence: Synthetic oligonucleotide
ttaagagatctgtaaggcctt

SEQ ID NO: 31620 - RNA, 21 nt, synthetic construct
  source 1..21: mol_type = other RNA; note = Description of Artificial Sequence: Synthetic oligonucleotide
tgtaagagatctgtaaggctt

SEQ ID NO: 31621 - RNA, 21 nt, synthetic construct
  source 1..21: mol_type = other RNA; note = Description of Artificial Sequence: Synthetic oligonucleotide
ttgtaagagatctgtaaggtt

SEQ ID NO: 31622 - RNA, 21 nt, synthetic construct
  source 1..21: mol_type = other RNA; note = Description of Artificial Sequence: Synthetic oligonucleotide
tgtgtaagagatctgtaagtt

SEQ ID NO: 31623 - RNA, 21 nt, synthetic construct
  source 1..21: mol_type = other RNA; note = Description of Artificial Sequence: Synthetic oligonucleotide
tagtgtaagagatctgtaatt

SEQ ID NO: 31624 - RNA, 21 nt, synthetic construct
  source 1..21: mol_type = other RNA; note = Description of Artificial Sequence: Synthetic oligonucleotide
tgagtgtaagagatctgtatt

SEQ ID NO: 31625 - RNA, 21 nt, synthetic construct
  source 1..21: mol_type = other RNA; note = Description of Artificial Sequence: Synthetic oligonucleotide
tcgagtgtaagagatctgttt

SEQ ID NO: 31626 - RNA, 21 nt, synthetic construct
  source 1..21: mol_type = other RNA; note = Description of Artificial Sequence: Synthetic oligonucleotide
tacgagtgtaagagatctgtt

SEQ ID NO: 31627 - RNA, 21 nt, synthetic construct
  source 1..21: mol_type = other RNA; note = Description of Artificial Sequence: Synthetic oligonucleotide
tcacgagtgtaagagatcttt

SEQ ID NO: 31628 - RNA, 21 nt, synthetic construct
  source 1..21: mol_type = other RNA; note = Description of Artificial Sequence: Synthetic oligonucleotide
tccacgagtgtaagagatctt

SEQ ID NO: 31629 - RNA, 21 nt, synthetic construct
  source 1..21: mol_type = other RNA; note = Description of Artificial Sequence: Synthetic oligonucleotide
taccacgagtgtaagagattt

SEQ ID NO: 31630 - RNA, 21 nt, synthetic construct
  source 1..21: mol_type = other RNA; note = Description of Artificial Sequence: Synthetic oligonucleotide
tcaccacgagtgtaagagatt

SEQ ID NO: 31631 - RNA, 21 nt, synthetic construct
  source 1..21: mol_type = other RNA; note = Description of Artificial Sequence: Synthetic oligonucleotide
tccaccacgagtgtaagagtt

SEQ ID NO: 31632 - RNA, 21 nt, synthetic construct
  source 1..21: mol_type = other RNA; note = Description of Artificial Sequence: Synthetic oligonucleotide
tcccaccacgagtgtaagatt

SEQ ID NO: 31633 - RNA, 21 nt, synthetic construct
  source 1..21: mol_type = other RNA; note = Description of Artificial Sequence: Synthetic oligonucleotide
ttcccaccacgagtgtaagtt

SEQ ID NO: 31634 - RNA, 21 nt, synthetic construct
  source 1..21: mol_type = other RNA; note = Description of Artificial Sequence: Synthetic oligonucleotide
tttcccaccacgagtgtaatt

SEQ ID NO: 31635 - RNA, 21 nt, synthetic construct
  source 1..21: mol_type = other RNA; note = Description of Artificial Sequence: Synthetic oligonucleotide
tcttcccaccacgagtgtatt

SEQ ID NO: 31636 - RNA, 21 nt, synthetic construct
  source 1..21: mol_type = other RNA; note = Description of Artificial Sequence: Synthetic oligonucleotide
ttcttcccaccacgagtgttt

SEQ ID NO: 31637 - RNA, 21 nt, synthetic construct
  source 1..21: mol_type = other RNA; note = Description of Artificial Sequence: Synthetic oligonucleotide
tctcttcccaccacgagtgtt

SEQ ID NO: 31638 - RNA, 21 nt, synthetic construct
  source 1..21: mol_type = other RNA; note = Description of Artificial Sequence: Synthetic oligonucleotide
tactcttcccaccacgagttt

SEQ ID NO: 31639 - RNA, 21 nt, synthetic construct
  source 1..21: mol_type = other RNA; note = Description of Artificial Sequence: Synthetic oligonucleotide
taactcttcccaccacgagtt

SEQ ID NO: 31640 - RNA, 21 nt, synthetic construct
  source 1..21: mol_type = other RNA; note = Description of Artificial Sequence: Synthetic oligonucleotide
taaactcttcccaccacgatt

SEQ ID NO: 31641 - RNA, 21 nt, synthetic construct
  source 1..21: mol_type = other RNA; note = Description of Artificial Sequence: Synthetic oligonucleotide
ttaaactcttcccaccacgtt

SEQ ID NO: 31642 - RNA, 21 nt, synthetic construct
  source 1..21: mol_type = other RNA; note = Description of Artificial Sequence: Synthetic oligonucleotide
tctaaactcttcccaccactt

SEQ ID NO: 31643 - RNA, 21 nt, synthetic construct
  source 1..21: mol_type = other RNA; note = Description of Artificial Sequence: Synthetic oligonucleotide
tactaaactcttcccaccatt

SEQ ID NO: 31644 - RNA, 21 nt, synthetic construct
  source 1..21: mol_type = other RNA; note = Description of Artificial Sequence: Synthetic oligonucleotide
tcactaaactcttcccacctt

SEQ ID NO: 31645 - RNA, 21 nt, synthetic construct
  source 1..21: mol_type = other RNA; note = Description of Artificial Sequence: Synthetic oligonucleotide
tacactaaactcttcccactt

SEQ ID NO: 31646 - RNA, 21 nt, synthetic construct
  source 1..21: mol_type = other RNA; note = Description of Artificial Sequence: Synthetic oligonucleotide
tcacactaaactcttcccatt

SEQ ID NO: 31647 - RNA, 21 nt, synthetic construct
  source 1..21: mol_type = other RNA; note = Description of Artificial Sequence: Synthetic oligonucleotide
ttcacactaaactcttccctt

SEQ ID NO: 31648 - RNA, 21 nt, synthetic construct
  source 1..21: mol_type = other RNA; note = Description of Artificial Sequence: Synthetic oligonucleotide
tttcacactaaactcttcctt

SEQ ID NO: 31649 - RNA, 21 nt, synthetic construct
  source 1..21: mol_type = other RNA; note = Description of Artificial Sequence: Synthetic oligonucleotide
ttttcacactaaactcttctt

SEQ ID NO: 31650 - RNA, 21 nt, synthetic construct
  source 1..21: mol_type = other RNA; note = Description of Artificial Sequence: Synthetic oligonucleotide
tgtttcacactaaactctttt

SEQ ID NO: 31651 - RNA, 21 nt, synthetic construct
  source 1..21: mol_type = other RNA; note = Description of Artificial Sequence: Synthetic oligonucleotide
tagtttcacactaaactcttt

SEQ ID NO: 31652 - RNA, 21 nt, synthetic construct
  source 1..21: mol_type = other RNA; note = Description of Artificial Sequence: Synthetic oligonucleotide
tcagtttcacactaaactctt

SEQ ID NO: 31653 - RNA, 21 nt, synthetic construct
  source 1..21: mol_type = other RNA; note = Description of Artificial Sequence: Synthetic oligonucleotide
tccagtttcacactaaacttt

SEQ ID NO: 31654 - RNA, 21 nt, synthetic construct
  source 1..21: mol_type = other RNA; note = Description of Artificial Sequence: Synthetic oligonucleotide
tcccagtttcacactaaactt

SEQ ID NO: 31655 - RNA, 21 nt, synthetic construct
  source 1..21: mol_type = other RNA; note = Description of Artificial Sequence: Synthetic oligonucleotide
tccccagtttcacactaaatt

SEQ ID NO: 31656 - RNA, 21 nt, synthetic construct
  source 1..21: mol_type = other RNA; note = Description of Artificial Sequence: Synthetic oligonucleotide
taccccagtttcacactaatt

SEQ ID NO: 31657 - RNA, 21 nt, synthetic construct
  source 1..21: mol_type = other RNA; note = Description of Artificial Sequence: Synthetic oligonucleotide
tcaccccagtttcacactatt

SEQ ID NO: 31658 - RNA, 21 nt, synthetic construct
  source 1..21: mol_type = other RNA; note = Description of Artificial Sequence: Synthetic oligonucleotide
tccaccccagtttcacacttt

SEQ ID NO: 31659 - RNA, 21 nt, synthetic construct
  source 1..21: mol_type = other RNA; note = Description of Artificial Sequence: Synthetic oligonucleotide
ttccaccccagtttcacactt

SEQ ID NO: 31660 - RNA, 21 nt, synthetic construct
  source 1..21: mol_type = other RNA; note = Description of Artificial Sequence: Synthetic oligonucleotide
tttccaccccagtttcacatt

SEQ ID NO: 31661 - RNA, 21 nt, synthetic construct
  source 1..21: mol_type = other RNA; note = Description of Artificial Sequence: Synthetic oligonucleotide
tattccaccccagtttcactt

SEQ ID NO: 31662 - RNA, 21 nt, synthetic construct
  source 1..21: mol_type = other RNA; note = Description of Artificial Sequence: Synthetic oligonucleotide
taattccaccccagtttcatt

SEQ ID NO: 31663 - RNA, 21 nt, synthetic construct
  source 1..21: mol_type = other RNA; note = Description of Artificial Sequence: Synthetic oligonucleotide
tcaattccaccccagtttctt

SEQ ID NO: 31664 - RNA, 21 nt, synthetic construct
  source 1..21: mol_type = other RNA; note = Description of Artificial Sequence: Synthetic oligonucleotide
tccaattccaccccagttttt

SEQ ID NO: 31665 - RNA, 21 nt, synthetic construct
  source 1..21: mol_type = other RNA; note = Description of Artificial Sequence: Synthetic oligonucleotide
tcccaattccaccccagtttt

SEQ ID NO: 31666 - RNA, 21 nt, synthetic construct
  source 1..21: mol_type = other RNA; note = Description of Artificial Sequence: Synthetic oligonucleotide
tacccaattccaccccagttt

SEQ ID NO: 31667 - RNA, 21 nt, synthetic construct
  source 1..21: mol_type = other RNA; note = Description of Artificial Sequence: Synthetic oligonucleotide
tcacccaattccaccccagtt

SEQ ID NO: 31668 - RNA, 21 nt, synthetic construct
  source 1..21: mol_type = other RNA; note = Description of Artificial Sequence: Synthetic oligonucleotide
tacacccaattccaccccatt

SEQ ID NO: 31669 - RNA, 21 nt, synthetic construct
  source 1..21: mol_type = other RNA; note = Description of Artificial Sequence: Synthetic oligonucleotide
tgacacccaattccacccctt

SEQ ID NO: 31670 - RNA, 21 nt, synthetic construct
  source 1..21: mol_type = other RNA; note = Description of Artificial Sequence: Synthetic oligonucleotide
tggacacccaattccaccctt

SEQ ID NO: 31671 - RNA, 21 nt, synthetic construct
  source 1..21: mol_type = other RNA; note = Description of Artificial Sequence: Synthetic oligonucleotide
ttggacacccaattccacctt

SEQ ID NO: 31672 - RNA, 21 nt, synthetic construct
  source 1..21: mol_type = other RNA; note = Description of Artificial Sequence: Synthetic oligonucleotide
tgtggacacccaattccactt

SEQ ID NO: 31673 - RNA, 21 nt, synthetic construct
  source 1..21: mol_type = other RNA; note = Description of Artificial Sequence: Synthetic oligonucleotide
tcgtggacacccaattccatt

SEQ ID NO: 31674 - RNA, 21 nt, synthetic construct
  source 1..21: mol_type = other RNA; note = Description of Artificial Sequence: Synthetic oligonucleotide
tacgtggacacccaattcctt

SEQ ID NO: 31675 - RNA, 21 nt, synthetic construct
  source 1..21: mol_type = other RNA; note = Description of Artificial Sequence: Synthetic oligonucleotide
ttacgtggacacccaattctt

SEQ ID NO: 31676 - RNA, 21 nt, synthetic construct
  source 1..21: mol_type = other RNA; note = Description of Artificial Sequence: Synthetic oligonucleotide
tatacgtggacacccaatttt

SEQ ID NO: 31677 - RNA, 21 nt, synthetic construct
  source 1..21: mol_type = other RNA; note = Description of Artificial Sequence: Synthetic oligonucleotide
tcatacgtggacacccaattt

SEQ ID NO: 31678 - RNA, 21 nt, synthetic construct
  source 1..21: mol_type = other RNA; note = Description of Artificial Sequence: Synthetic oligonucleotide
tacatacgtggacacccaatt

SEQ ID NO: 31679 - RNA, 21 nt, synthetic construct
  source 1..21: mol_type = other RNA; note = Description of Artificial Sequence: Synthetic oligonucleotide
taacatacgtggacacccatt

SEQ ID NO: 31680 - RNA, 21 nt, synthetic construct
  source 1..21: mol_type = other RNA; note = Description of Artificial Sequence: Synthetic oligonucleotide
tgaacatacgtggacaccctt

SEQ ID NO: 31681 - RNA, 21 nt, synthetic construct
  source 1..21: mol_type = other RNA; note = Description of Artificial Sequence: Synthetic oligonucleotide
tggaacatacgtggacacctt

SEQ ID NO: 31682 - RNA, 21 nt, synthetic construct
  source 1..21: mol_type = other RNA; note = Description of Artificial Sequence: Synthetic oligonucleotide
tgggaacatacgtggacactt

SEQ ID NO: 31683 - RNA, 21 nt, synthetic construct
  source 1..21: mol_type = other RNA; note = Description of Artificial Sequence: Synthetic oligonucleotide
tagggaacatacgtggacatt

SEQ ID NO: 31684 - RNA, 21 nt, synthetic construct
  source 1..21: mol_type = other RNA; note = Description of Artificial Sequence: Synthetic oligonucleotide
taagggaacatacgtggactt

SEQ ID NO: 31685 - RNA, 21 nt, synthetic construct
  source 1..21: mol_type = other RNA; note = Description of Artificial Sequence: Synthetic oligonucleotide
taaagggaacatacgtggatt

SEQ ID NO: 31686 - RNA, 21 nt, synthetic construct
  source 1..21: mol_type = other RNA; note = Description of Artificial Sequence: Synthetic oligonucleotide
taaaagggaacatacgtggtt

SEQ ID NO: 31687 - RNA, 21 nt, synthetic construct
  source 1..21: mol_type = other RNA; note = Description of Artificial Sequence: Synthetic oligonucleotide
tcaaaagggaacatacgtgtt

SEQ ID NO: 31688 - RNA, 21 nt, synthetic construct
  source 1..21: mol_type = other RNA; note = Description of Artificial Sequence: Synthetic oligonucleotide
tgcaaaagggaacatacgttt

SEQ ID NO: 31689 - RNA, 21 nt, synthetic construct
  source 1..21: mol_type = other RNA; note = Description of Artificial Sequence: Synthetic oligonucleotide
tggcaaaagggaacatacgtt

SEQ ID NO: 31690 - RNA, 21 nt, synthetic construct
  source 1..21: mol_type = other RNA; note = Description of Artificial Sequence: Synthetic oligonucleotide
taggcaaaagggaacatactt

SEQ ID NO: 31691 - RNA, 21 nt, synthetic construct
  source 1..21: mol_type = other RNA; note = Description of Artificial Sequence: Synthetic oligonucleotide
taaggcaaaagggaacatatt

SEQ ID NO: 31692 - RNA, 21 nt, synthetic construct
  source 1..21: mol_type = other RNA; note = Description of Artificial Sequence: Synthetic oligonucleotide
ttaaggcaaaagggaacattt

SEQ ID NO: 31693 - RNA, 21 nt, synthetic construct
  source 1..21: mol_type = other RNA; note = Description of Artificial Sequence: Synthetic oligonucleotide
tgtaaggcaaaagggaacatt

SEQ ID NO: 31694 - RNA, 21 nt, synthetic construct
  source 1..21: mol_type = other RNA; note = Description of Artificial Sequence: Synthetic oligonucleotide
tagtaaggcaaaagggaactt

SEQ ID NO: 31695 - RNA, 21 nt, synthetic construct
  source 1..21: mol_type = other RNA; note = Description of Artificial Sequence: Synthetic oligonucleotide
ttagtaaggcaaaagggaatt

SEQ ID NO: 31696 - RNA, 21 nt, synthetic construct
  source 1..21: mol_type = other RNA; note = Description of Artificial Sequence: Synthetic oligonucleotide
tatagtaaggcaaaagggatt

SEQ ID NO: 31697 - RNA, 21 nt, synthetic construct
  source 1..21: mol_type = other RNA; note = Description of Artificial Sequence: Synthetic oligonucleotide
ttatagtaaggcaaaagggtt

SEQ ID NO: 31698 - RNA, 21 nt, synthetic construct
  source 1..21: mol_type = other RNA; note = Description of Artificial Sequence: Synthetic oligonucleotide
tatatagtaaggcaaaaggtt

SEQ ID NO: 31699 - RNA, 21 nt, synthetic construct
  source 1..21: mol_type = other RNA; note = Description of Artificial Sequence: Synthetic oligonucleotide
tcatatagtaaggcaaaagtt

SEQ ID NO: 31700 - RNA, 21 nt, synthetic construct
  source 1..21: mol_type = other RNA; note = Description of Artificial Sequence: Synthetic oligonucleotide
tacatatagtaaggcaaaatt

SEQ ID NO: 31701 - RNA, 21 nt, synthetic construct
  source 1..21: mol_type = other RNA; note = Description of Artificial Sequence: Synthetic oligonucleotide
taacatatagtaaggcaaatt

SEQ ID NO: 31702 - RNA, 21 nt, synthetic construct
  source 1..21: mol_type = other RNA; note = Description of Artificial Sequence: Synthetic oligonucleotide
tgaacatatagtaaggcaatt

SEQ ID NO: 31703 - RNA, 21 nt, synthetic construct
  source 1..21: mol_type = other RNA; note = Description of Artificial Sequence: Synthetic oligonucleotide
tagaacatatagtaaggcatt

SEQ ID NO: 31704 - RNA, 21 nt, synthetic construct
  source 1..21: mol_type = other RNA; note = Description of Artificial Sequence: Synthetic oligonucleotide
tcagaacatatagtaaggctt

SEQ ID NO: 31705 - RNA, 21 nt, synthetic construct
  source 1..21: mol_type = other RNA; note = Description of Artificial Sequence: Synthetic oligonucleotide
tacagaacatatagtaaggtt

SEQ ID NO: 31706 - RNA, 21 nt, synthetic construct
  source 1..21: mol_type = other RNA; note = Description of Artificial Sequence: Synthetic oligonucleotide
tgacagaacatatagtaagtt

SEQ ID NO: 31707 - RNA, 21 nt, synthetic construct
  source 1..21: mol_type = other RNA; note = Description of Artificial Sequence: Synthetic oligonucleotide
ttgacagaacatatagtaatt

SEQ ID NO: 31708 - RNA, 21 nt, synthetic construct
  source 1..21: mol_type = other RNA; note = Description of Artificial Sequence: Synthetic oligonucleotide
tctgacagaacatatagtatt

SEQ ID NO: 31709 - RNA, 21 nt, synthetic construct
  source 1..21: mol_type = other RNA; note = Description of Artificial Sequence: Synthetic oligonucleotide
tactgacagaacatatagttt

SEQ ID NO: 31710 - RNA, 21 nt, synthetic construct
  source 1..21: mol_type = other RNA; note = Description of Artificial Sequence: Synthetic oligonucleotide
taactgacagaacatatagtt

SEQ ID NO: 31711 - RNA, 21 nt, synthetic construct
  source 1..21: mol_type = other RNA; note = Description of Artificial Sequence: Synthetic oligonucleotide
taaactgacagaacatatatt

SEQ ID NO: 31712 - RNA, 21 nt, synthetic construct
  source 1..21: mol_type = other RNA; note = Description of Artificial Sequence: Synthetic oligonucleotide
tgaaactgacagaacatattt

SEQ ID NO: 31713 - RNA, 21 nt, synthetic construct
  source 1..21: mol_type = other RNA; note = Description of Artificial Sequence: Synthetic oligonucleotide
tagaaactgacagaacatatt

SEQ ID NO: 31714 - RNA, 21 nt, synthetic construct
  source 1..21: mol_type = other RNA; note = Description of Artificial Sequence: Synthetic oligonucleotide
taagaaactgacagaacattt

SEQ ID NO: 31715 - RNA, 21 nt, synthetic construct
  source 1..21: mol_type = other RNA; note = Description of Artificial Sequence: Synthetic oligonucleotide
taaagaaactgacagaacatt

SEQ ID NO: 31716 - RNA, 21 nt, synthetic construct
  source 1..21: mol_type = other RNA; note = Description of Artificial Sequence: Synthetic oligonucleotide
tgaaagaaactgacagaactt

SEQ ID NO: 31717 - RNA, 21 nt, synthetic construct
  source 1..21: mol_type = other RNA; note = Description of Artificial Sequence: Synthetic oligonucleotide
ttgaaagaaactgacagaatt

SEQ ID NO: 31718 - RNA, 21 nt, synthetic construct
  source 1..21: mol_type = other RNA; note = Description of Artificial Sequence: Synthetic oligonucleotide
tctgaaagaaactgacagatt

SEQ ID NO: 31719 - RNA, 21 nt, synthetic construct
  source 1..21: mol_type = other RNA; note = Description of Artificial Sequence: Synthetic oligonucleotide
tcctgaaagaaactgacagtt

SEQ ID NO: 31720 - RNA, 21 nt, synthetic construct
  source 1..21: mol_type = other RNA; note = Description of Artificial Sequence: Synthetic oligonucleotide
ttcctgaaagaaactgacatt

SEQ ID NO: 31721 - RNA, 21 nt, synthetic construct
  source 1..21: mol_type = other RNA; note = Description of Artificial Sequence: Synthetic oligonucleotide
tttcctgaaagaaactgactt

SEQ ID NO: 31722 - RNA, 21 nt, synthetic construct
  source 1..21: mol_type = other RNA; note = Description of Artificial Sequence: Synthetic oligonucleotide
ttttcctgaaagaaactgatt

SEQ ID NO: 31723 - RNA, 21 nt, synthetic construct
  source 1..21: mol_type = other RNA; note = Description of Artificial Sequence: Synthetic oligonucleotide
tttttcctgaaagaaactgtt

SEQ ID NO: 31724 - RNA, 21 nt, synthetic construct
  source 1..21: mol_type = other RNA; note = Description of Artificial Sequence: Synthetic oligonucleotide
tattttcctgaaagaaacttt

SEQ ID NO: 31725 - RNA, 21 nt, synthetic construct
  source 1..21: mol_type = other RNA; note = Description of Artificial Sequence: Synthetic oligonucleotide
tgattttcctgaaagaaactt

SEQ ID NO: 31726 - RNA, 21 nt, synthetic construct
  source 1..21: mol_type = other RNA; note = Description of Artificial Sequence: Synthetic oligonucleotide
tagattttcctgaaagaaatt

SEQ ID NO: 31727 - RNA, 21 nt, synthetic construct
  source 1..21: mol_type = other RNA; note = Description of Artificial Sequence: Synthetic oligonucleotide
taagattttcctgaaagaatt

SEQ ID NO: 31728 - RNA, 21 nt, synthetic construct
  source 1..21: mol_type = other RNA; note = Description of Artificial Sequence: Synthetic oligonucleotide
tgaagattttcctgaaagatt

SEQ ID NO: 31729 - RNA, 21 nt, synthetic construct
  source 1..21: mol_type = other RNA; note = Description of Artificial Sequence: Synthetic oligonucleotide
ttgaagattttcctgaaagtt

SEQ ID NO: 31730 - RNA, 21 nt, synthetic construct
  source 1..21: mol_type = other RNA; note = Description of Artificial Sequence: Synthetic oligonucleotide
tatgaagattttcctgaaatt

SEQ ID NO: 31731 - RNA, 21 nt, synthetic construct
  source 1..21: mol_type = other RNA; note = Description of Artificial Sequence: Synthetic oligonucleotide
tgatgaagattttcctgaatt

SEQ ID NO: 31732 - RNA, 21 nt, synthetic construct
  source 1..21: mol_type = other RNA; note = Description of Artificial Sequence: Synthetic oligonucleotide
tagatgaagattttcctgatt

SEQ ID NO: 31733 - RNA, 21 nt, synthetic construct
  source 1..21: mol_type = other RNA; note = Description of Artificial Sequence: Synthetic oligonucleotide
taagatgaagattttcctgtt

SEQ ID NO: 31734 - RNA, 21 nt, synthetic construct
  source 1..21: mol_type = other RNA; note = Description of Artificial Sequence: Synthetic oligonucleotide
ttaagatgaagattttccttt

SEQ ID NO: 31735 - RNA, 21 nt, synthetic construct
  source 1..21: mol_type = other RNA; note = Description of Artificial Sequence: Synthetic oligonucleotide
tgtaagatgaagattttcctt

SEQ ID NO: 31736 - RNA, 21 nt, synthetic construct
  source 1..21: mol_type = other RNA; note = Description of Artificial Sequence: Synthetic oligonucleotide
ttgtaagatgaagattttctt

SEQ ID NO: 31737 - RNA, 21 nt, synthetic construct
  source 1..21: mol_type = other RNA; note = Description of Artificial Sequence: Synthetic oligonucleotide
tttgtaagatgaagatttttt

SEQ ID NO: 31738 - RNA, 21 nt, synthetic construct
  source 1..21: mol_type = other RNA; note = Description of Artificial Sequence: Synthetic oligonucleotide
tgttgtaagatgaagattttt

SEQ ID NO: 31739 - RNA, 21 nt, synthetic construct
  source 1..21: mol_type = other RNA; note = Description of Artificial Sequence: Synthetic oligonucleotide
tagttgtaagatgaagatttt

SEQ ID NO: 31740 - RNA, 21 nt, synthetic construct
  source 1..21: mol_type = other RNA; note = Description of Artificial Sequence: Synthetic oligonucleotide
taagttgtaagatgaagattt

SEQ ID NO: 31741 - RNA, 21 nt, synthetic construct
  source 1..21: mol_type = other RNA; note = Description of Artificial Sequence: Synthetic oligonucleotide
tcaagttgtaagatgaagatt

SEQ ID NO: 31742 - RNA, 21 nt, synthetic construct
  source 1..21: mol_type = other RNA; note = Description of Artificial Sequence: Synthetic oligonucleotide
tacaagttgtaagatgaagtt

SEQ ID NO: 31743 - RNA, 21 nt, synthetic construct
  source 1..21: mol_type = other RNA; note = Description of Artificial Sequence: Synthetic oligonucleotide
ttacaagttgtaagatgaatt

SEQ ID NO: 31744 - RNA, 21 nt, synthetic construct
  source 1..21: mol_type = other RNA; note = Description of Artificial Sequence: Synthetic oligonucleotide
tctacaagttgtaagatgatt

SEQ ID NO: 31745 - RNA, 21 nt, synthetic construct
  source 1..21: mol_type = other RNA; note = Description of Artificial Sequence: Synthetic oligonucleotide
tcctacaagttgtaagatgtt

SEQ ID NO: 31746 - RNA, 21 nt, synthetic construct
  source 1..21: mol_type = other RNA; note = Description of Artificial Sequence: Synthetic oligonucleotide
tccctacaagttgtaagattt

SEQ ID NO: 31747 - RNA, 21 nt, synthetic construct
  source 1..21: mol_type = other RNA; note = Description of Artificial Sequence: Synthetic oligonucleotide
tgccctacaagttgtaagatt

SEQ ID NO: 31748 - RNA, 21 nt, synthetic construct
  source 1..21: mol_type = other RNA; note = Description of Artificial Sequence: Synthetic oligonucleotide
tagccctacaagttgtaagtt

SEQ ID NO: 31749 - RNA, 21 nt, synthetic construct
  source 1..21: mol_type = other RNA; note = Description of Artificial Sequence: Synthetic oligonucleotide
tcagccctacaagttgtaatt

SEQ ID NO: 31750 - RNA, 21 nt, synthetic construct
  source 1..21: mol_type = other RNA; note = Description of Artificial Sequence: Synthetic oligonucleotide
tccagccctacaagttgtatt

SEQ ID NO: 31751 - RNA, 21 nt, synthetic construct
  source 1..21: mol_type = other RNA; note = Description of Artificial Sequence: Synthetic oligonucleotide
taccagccctacaagttgttt

SEQ ID NO: 31752 - RNA, 21 nt, synthetic construct
  source 1..21: mol_type = other RNA; note = Description of Artificial Sequence: Synthetic oligonucleotide
tcaccagccctacaagttgtt

SEQ ID NO: 31753 - RNA, 21 nt, synthetic construct
  source 1..21: mol_type = other RNA; note = Description of Artificial Sequence: Synthetic oligonucleotide
tacaccagccctacaagtttt

SEQ ID NO: 31754 - RNA, 21 nt, synthetic construct
  source 1..21: mol_type = other RNA; note = Description of Artificial Sequence: Synthetic oligonucleotide
taacaccagccctacaagttt

SEQ ID NO: 31755 - RNA, 21 nt, synthetic construct
  source 1..21: mol_type = other RNA; note = Description of Artificial Sequence: Synthetic oligonucleotide
ttaacaccagccctacaagtt

SEQ ID NO: 31756 - RNA, 21 nt, synthetic construct
  source 1..21: mol_type = other RNA; note = Description of Artificial Sequence: Synthetic oligonucleotide
tttaacaccagccctacaatt

SEQ ID NO: 31757 - RNA, 21 nt, synthetic construct
  source 1..21: mol_type = other RNA; note = Description of Artificial Sequence: Synthetic oligonucleotide
tgttaacaccagccctacatt

SEQ ID NO: 31758 - RNA, 21 nt, synthetic construct
  source 1..21: mol_type = other RNA; note = Description of Artificial Sequence: Synthetic oligonucleotide
tagttaacaccagccctactt

SEQ ID NO: 31759 - RNA, 21 nt, synthetic construct
  source 1..21: mol_type = other RNA; note = Description of Artificial Sequence: Synthetic oligonucleotide
taagttaacaccagccctatt

SEQ ID NO: 31760 - RNA, 21 nt, synthetic construct
  source 1..21: mol_type = other RNA; note = Description of Artificial Sequence: Synthetic oligonucleotide
ttaagttaacaccagcccttt

SEQ ID NO: 31761 - RNA, 21 nt, synthetic construct
  source 1..21: mol_type = other RNA; note = Description of Artificial Sequence: Synthetic oligonucleotide
tgtaagttaacaccagccctt

SEQ ID NO: 31762 - RNA, 21 nt, synthetic construct
  source 1..21: mol_type = other RNA; note = Description of Artificial Sequence: Synthetic oligonucleotide
tcgtaagttaacaccagcctt

SEQ ID NO: 31763 - RNA, 21 nt, synthetic construct
  source 1..21: mol_type = other RNA; note = Description of Artificial Sequence: Synthetic oligonucleotide
ttcgtaagttaacaccagctt

SEQ ID NO: 31764 - RNA, 21 nt, synthetic construct
  source 1..21: mol_type = other RNA; note = Description of Artificial Sequence: Synthetic oligonucleotide
tgtcgtaagttaacaccagtt

SEQ ID NO: 31765 - RNA, 21 nt, synthetic construct
  source 1..21: mol_type = other RNA; note = Description of Artificial Sequence: Synthetic oligonucleotide
tagtcgtaagttaacaccatt

SEQ ID NO: 31766 - RNA, 21 nt, synthetic construct
  source 1..21: mol_type = other RNA; note = Description of Artificial Sequence: Synthetic oligonucleotide
taagtcgtaagttaacacctt

SEQ ID NO: 31767 - RNA, 21 nt, synthetic construct
  source 1..21: mol_type = other RNA; note = Description of Artificial Sequence: Synthetic oligonucleotide
tgaagtcgtaagttaacactt

SEQ ID NO: 31768 - RNA, 21 nt, synthetic construct
  source 1..21: mol_type = other RNA; note = Description of Artificial Sequence: Synthetic oligonucleotide
ttgaagtcgtaagttaacatt

SEQ ID NO: 31769 - RNA, 21 nt, synthetic construct
  source 1..21: mol_type = other RNA; note = Description of Artificial Sequence: Synthetic oligonucleotide
tgtgaagtcgtaagttaactt

SEQ ID NO: 31770 - RNA, 21 nt, synthetic construct
  source 1..21: mol_type = other RNA; note = Description of Artificial Sequence: Synthetic oligonucleotide
tagtgaagtcgtaagttaatt

SEQ ID NO: 31771 - RNA, 21 nt, synthetic construct
  source 1..21: mol_type = other RNA; note = Description of Artificial Sequence: Synthetic oligonucleotide
ttagtgaagtcgtaagttatt

SEQ ID NO: 31772 - RNA, 21 nt, synthetic construct
  source 1..21: mol_type = other RNA; note = Description of Artificial Sequence: Synthetic oligonucleotide
tttagtgaagtcgtaagtttt

SEQ ID NO: 31773 - RNA, 21 nt, synthetic construct
  source 1..21: mol_type = other RNA; note = Description of Artificial Sequence: Synthetic oligonucleotide
tgttagtgaagtcgtaagttt

SEQ ID NO: 31774 - RNA, 21 nt, synthetic construct
  source 1..21: mol_type = other RNA; note = Description of Artificial Sequence: Synthetic oligonucleotide
tagttagtgaagtcgtaagtt

SEQ ID NO: 31775 - RNA, 21 nt, synthetic construct
  source 1..21: mol_type = other RNA; note = Description of Artificial Sequence: Synthetic oligonucleotide
tcagttagtgaagtcgtaatt

SEQ ID NO: 31776 - RNA, 21 nt, synthetic construct
  source 1..21: mol_type = other RNA; note = Description of Artificial Sequence: Synthetic oligonucleotide
tacagttagtgaagtcgtatt

SEQ ID NO: 31777 - RNA, 21 nt, synthetic construct
  source 1..21: mol_type = other RNA; note = Description of Artificial Sequence: Synthetic oligonucleotide
tcacagttagtgaagtcgttt

SEQ ID NO: 31778 - RNA, 21 nt, synthetic construct
  source 1..21: mol_type = other RNA; note = Description of Artificial Sequence: Synthetic oligonucleotide
ttcacagttagtgaagtcgtt

SEQ ID NO: 31779 - RNA, 21 nt, synthetic construct
  source 1..21: mol_type = other RNA; note = Description of Artificial Sequence: Synthetic oligonucleotide
tgtcacagttagtgaagtctt

SEQ ID NO: 31780 - RNA, 21 nt, synthetic construct
  source 1..21: mol_type = other RNA; note = Description of Artificial Sequence: Synthetic oligonucleotide
tagtcacagttagtgaagttt

SEQ ID NO: 31781 - RNA, 21 nt, synthetic construct
  source 1..21: mol_type = other RNA; note = Description of Artificial Sequence: Synthetic oligonucleotide
taagtcacagttagtgaagtt

SEQ ID NO: 31782 - RNA, 21 nt, synthetic construct
  source 1..21: mol_type = other RNA; note = Description of Artificial Sequence: Synthetic oligonucleotide
taaagtcacagttagtgaatt

SEQ ID NO: 31783 - RNA, 21 nt, synthetic construct
  source 1..21: mol_type = other RNA; note = Description of Artificial Sequence: Synthetic oligonucleotide
tcaaagtcacagttagtgatt

SEQ ID NO: 31784 - RNA, 21 nt, synthetic construct
  source 1..21: mol_type = other RNA; note = Description of Artificial Sequence: Synthetic oligonucleotide
ttcaaagtcacagttagtgtt

SEQ ID NO: 31785 - RNA, 21 nt, synthetic construct
  source 1..21: mol_type = other RNA; note = Description of Artificial Sequence: Synthetic oligonucleotide
tctcaaagtcacagttagttt

SEQ ID NO: 31786 - RNA, 21 nt, synthetic construct
  source 1..21: mol_type = other RNA; note = Description of Artificial Sequence: Synthetic oligonucleotide
ttctcaaagtcacagttagtt

SEQ ID NO: 31787 - RNA, 21 nt, synthetic construct
  source 1..21: mol_type = other RNA; note = Description of Artificial Sequence: Synthetic oligonucleotide
tttctcaaagtcacagttatt

SEQ ID NO: 31788 - RNA, 21 nt, synthetic construct
  source 1..21: mol_type = other RNA; note = Description of Artificial Sequence: Synthetic oligonucleotide
tcttctcaaagtcacagtttt

SEQ ID NO: 31789 - RNA, 21 nt, synthetic construct
  source 1..21: mol_type = other RNA; note = Description of Artificial Sequence: Synthetic oligonucleotide
ttcttctcaaagtcacagttt

SEQ ID NO: 31790 - RNA, 21 nt, synthetic construct
  source 1..21: mol_type = other RNA; note = Description of Artificial Sequence: Synthetic oligonucleotide
tatcttctcaaagtcacagtt

SEQ ID NO: 31791 - RNA, 21 nt, synthetic construct
  source 1..21: mol_type = other RNA; note = Description of Artificial Sequence: Synthetic oligonucleotide
taatcttctcaaagtcacatt

SEQ ID NO: 31792 - RNA, 21 nt, synthetic construct
  source 1..21: mol_type = other RNA; note = Description of Artificial Sequence: Synthetic oligonucleotide
ttaatcttctcaaagtcactt

SEQ ID NO: 31793 - RNA, 21 nt, synthetic construct
  source 1..21: mol_type = other RNA; note = Description of Artificial Sequence: Synthetic oligonucleotide
tttaatcttctcaaagtcatt

SEQ ID NO: 31794 - RNA, 21 nt, synthetic construct
  source 1..21: mol_type = other RNA; note = Description of Artificial Sequence: Synthetic oligonucleotide
ttttaatcttctcaaagtctt

SEQ ID NO: 31795 - RNA, 21 nt, synthetic construct
  source 1..21: mol_type = other RNA; note = Description of Artificial Sequence: Synthetic oligonucleotide
tctttaatcttctcaaagttt

SEQ ID NO: 31796 - RNA, 21 nt, synthetic construct
  source 1..21: mol_type = other RNA; note = Description of Artificial Sequence: Synthetic oligonucleotide
tgctttaatcttctcaaagtt

SEQ ID NO: 31797 - RNA, 21 nt, synthetic construct
  source 1..21: mol_type = other RNA; note = Description of Artificial Sequence: Synthetic oligonucleotide
ttgctttaatcttctcaaatt

SEQ ID NO: 31798 - RNA, 21 nt, synthetic construct
  source 1..21: mol_type = other RNA; note = Description of Artificial Sequence: Synthetic oligonucleotide
tctgctttaatcttctcaatt

SEQ ID NO: 31799 - RNA, 21 nt, synthetic construct
  source 1..21: mol_type = other RNA; note = Description of Artificial Sequence: Synthetic oligonucleotide
tgctgctttaatcttctcatt

SEQ ID NO: 31800 - RNA, 21 nt, synthetic construct
  source 1..21: mol_type = other RNA; note = Description of Artificial Sequence: Synthetic oligonucleotide
tggctgctttaatcttctctt

SEQ ID NO: 31801 - RNA, 21 nt, synthetic construct
  source 1..21: mol_type = other RNA; note = Description of Artificial Sequence: Synthetic oligonucleotide
taggctgctttaatcttcttt

SEQ ID NO: 31802 - RNA, 21 nt, synthetic construct
  source 1..21: mol_type = other RNA; note = Description of Artificial Sequence: Synthetic oligonucleotide
ttaggctgctttaatcttctt

SEQ ID NO: 31803 - RNA, 21 nt, synthetic construct
  source 1..21: mol_type = other RNA; note = Description of Artificial Sequence: Synthetic oligonucleotide
tataggctgctttaatctttt

SEQ ID NO: 31804 - RNA, 21 nt, synthetic construct
  source 1..21: mol_type = other RNA; note = Description of Artificial Sequence: Synthetic oligonucleotide
tgataggctgctttaatcttt

SEQ ID NO: 31805 - RNA, 21 nt, synthetic construct
  source 1..21: mol_type = other RNA; note = Description of Artificial Sequence: Synthetic oligonucleotide
tagataggctgctttaatctt

SEQ ID NO: 31806 - RNA, 21 nt, synthetic construct
  source 1..21: mol_type = other RNA; note = Description of Artificial Sequence: Synthetic oligonucleotide
tgagataggctgctttaattt

SEQ ID NO: 31807 - RNA, 21 nt, synthetic construct
  source 1..21: mol_type = other RNA; note = Description of Artificial Sequence: Synthetic oligonucleotide
ttgagataggctgctttaatt

SEQ ID NO: 31808 - RNA, 21 nt, synthetic construct
  source 1..21: mol_type = other RNA; note = Description of Artificial Sequence: Synthetic oligonucleotide
tctgagataggctgctttatt

SEQ ID NO: 31809 - RNA, 21 nt, synthetic construct
  source 1..21: mol_type = other RNA; note = Description of Artificial Sequence: Synthetic oligonucleotide
tactgagataggctgcttttt

SEQ ID NO: 31810 - RNA, 21 nt, synthetic construct
  source 1..21: mol_type = other RNA; note = Description of Artificial Sequence: Synthetic oligonucleotide
ttactgagataggctgctttt

SEQ ID NO: 31811 - RNA, 21 nt, synthetic construct
  source 1..21: mol_type = other RNA; note = Description of Artificial Sequence: Synthetic oligonucleotide
tgtactgagataggctgcttt

SEQ ID NO: 31812 - RNA, 21 nt, synthetic construct
  source 1..21: mol_type = other RNA; note = Description of Artificial Sequence: Synthetic oligonucleotide
tagtactgagataggctgctt

SEQ ID NO: 31813 - RNA, 21 nt, synthetic construct
  source 1..21: mol_type = other RNA; note = Description of Artificial Sequence: Synthetic oligonucleotide
ttagtactgagataggctgtt

SEQ ID NO: 31814 - RNA, 21 nt, synthetic construct
  source 1..21: mol_type = other RNA; note = Description of Artificial Sequence: Synthetic oligonucleotide
tatagtactgagataggcttt

SEQ ID NO: 31815 - RNA, 21 nt, synthetic construct
  source 1..21: mol_type = other RNA; note = Description of Artificial Sequence: Synthetic oligonucleotide
taatagtactgagataggctt

SEQ ID NO: 31816 - RNA, 21 nt, synthetic construct
  source 1..21: mol_type = other RNA; note = Description of Artificial Sequence: Synthetic oligonucleotide
taaatagtactgagataggtt

SEQ ID NO: 31817 - RNA, 21 nt, synthetic construct
  source 1..21: mol_type = other RNA; note = Description of Artificial Sequence: Synthetic oligonucleotide
tgaaatagtactgagatagtt

SEQ ID NO: 31818 - RNA, 21 nt, synthetic construct
  source 1..21: mol_type = other RNA; note = Description of Artificial Sequence: Synthetic oligonucleotide
tagaaatagtactgagatatt

SEQ ID NO: 31819 - RNA, 21 nt, synthetic construct
  source 1..21: mol_type = other RNA; note = Description of Artificial Sequence: Synthetic oligonucleotide
ttagaaatagtactgagattt

SEQ ID NO: 31820 - RNA, 21 nt, synthetic construct
  source 1..21: mol_type = other RNA; note = Description of Artificial Sequence: Synthetic oligonucleotide
tttagaaatagtactgagatt

SEQ ID NO: 31821 - RNA, 21 nt, synthetic construct
  source 1..21: mol_type = other RNA; note = Description of Artificial Sequence: Synthetic oligonucleotide
ttttagaaatagtactgagtt

SEQ ID NO: 31822 - RNA, 21 nt, synthetic construct
  source 1..21: mol_type = other RNA; note = Description of Artificial Sequence: Synthetic oligonucleotide
tctttagaaatagtactgatt

SEQ ID NO: 31823 - RNA, 21 nt, synthetic construct
  source 1..21: mol_type = other RNA; note = Description of Artificial Sequence: Synthetic oligonucleotide
ttctttagaaatagtactgtt

SEQ ID NO: 31824 - RNA, 21 nt, synthetic construct
  source 1..21: mol_type = other RNA; note = Description of Artificial Sequence: Synthetic oligonucleotide
tgtctttagaaatagtacttt

SEQ ID NO: 31825 - RNA, 21 nt, synthetic construct
  source 1..21: mol_type = other RNA; note = Description of Artificial Sequence: Synthetic oligonucleotide
tggtctttagaaatagtactt

SEQ ID NO: 31826 - RNA, 21 nt, synthetic construct
  source 1..21: mol_type = other RNA; note = Description of Artificial Sequence: Synthetic oligonucleotide
taggtctttagaaatagtatt

SEQ ID NO: 31827 - RNA, 21 nt, synthetic construct
  source 1..21: mol_type = other RNA; note = Description of Artificial Sequence: Synthetic oligonucleotide
tcaggtctttagaaatagttt

SEQ ID NO: 31828 - RNA, 21 nt, synthetic construct
  source 1..21: mol_type = other RNA; note = Description of Artificial Sequence: Synthetic oligonucleotide
ttcaggtctttagaaatagtt

SEQ ID NO: 31829 - RNA, 21 nt, synthetic construct
  source 1..21: mol_type = other RNA; note = Description of Artificial Sequence: Synthetic oligonucleotide
tatcaggtctttagaaatatt

SEQ ID NO: 31830 - RNA, 21 nt, synthetic construct
  source 1..21: mol_type = other RNA; note = Description of Artificial Sequence: Synthetic oligonucleotide
taatcaggtctttagaaattt

SEQ ID NO: 31831 - RNA, 21 nt, synthetic construct
  source 1..21: mol_type = other RNA; note = Description of Artificial Sequence: Synthetic oligonucleotide
ttaatcaggtctttagaaatt

SEQ ID NO: 31832 - RNA, 21 nt, synthetic construct
  source 1..21: mol_type = other RNA; note = Description of Artificial Sequence: Synthetic oligonucleotide
tgtaatcaggtctttagaatt

SEQ ID NO: 31833 - RNA, 21 nt, synthetic construct
  source 1..21: mol_type = other RNA; note = Description of Artificial Sequence: Synthetic oligonucleotide
ttgtaatcaggtctttagatt

SEQ ID NO: 31834 - RNA, 21 nt, synthetic construct
  source 1..21: mol_type = other RNA; note = Description of Artificial Sequence: Synthetic oligonucleotide
tatgtaatcaggtctttagtt

SEQ ID NO: 31835 - RNA, 21 nt, synthetic construct
  source 1..21: mol_type = other RNA; note = Description of Artificial Sequence: Synthetic oligonucleotide
ttatgtaatcaggtctttatt

SEQ ID NO: 31836 - RNA, 21 nt, synthetic construct
  source 1..21: mol_type = other RNA; note = Description of Artificial Sequence: Synthetic oligonucleotide
tatatgtaatcaggtcttttt

SEQ ID NO: 31837 - RNA, 21 nt, synthetic construct
  source 1..21: mol_type = other RNA; note = Description of Artificial Sequence: Synthetic oligonucleotide
ttatatgtaatcaggtctttt

SEQ ID NO: 31838 - RNA, 21 nt, synthetic construct
  source 1..21: mol_type = other RNA; note = Description of Artificial Sequence: Synthetic oligonucleotide
tatatatgtaatcaggtcttt

SEQ ID NO: 31839 - RNA, 21 nt, synthetic construct
  source 1..21: mol_type = other RNA; note = Description of Artificial Sequence: Synthetic oligonucleotide
tcatatatgtaatcaggtctt

SEQ ID NO: 31840 - RNA, 21 nt, synthetic construct
  source 1..21: mol_type = other RNA; note = Description of Artificial Sequence: Synthetic oligonucleotide
ttcatatatgtaatcaggttt

SEQ ID NO: 31841 - RNA, 21 nt, synthetic construct
  source 1..21: mol_type = other RNA; note = Description of Artificial Sequence: Synthetic oligonucleotide
tctcatatatgtaatcaggtt

SEQ ID NO: 31842 - RNA, 21 nt, synthetic construct
  source 1..21: mol_type = other RNA; note = Description of Artificial Sequence: Synthetic oligonucleotide
tactcatatatgtaatcagtt

SEQ ID NO: 31843 - RNA, 21 nt, synthetic construct
  source 1..21: mol_type = other RNA; note = Description of Artificial Sequence: Synthetic oligonucleotide
tcactcatatatgtaatcatt

SEQ ID NO: 31844 - RNA, 21 nt, synthetic construct
  source 1..21: mol_type = other RNA; note = Description of Artificial Sequence: Synthetic oligonucleotide
tccactcatatatgtaatctt

SEQ ID NO: 31845 - RNA, 21 nt, synthetic construct
  source 1..21: mol_type = other RNA; note = Description of Artificial Sequence: Synthetic oligonucleotide
tcccactcatatatgtaattt

SEQ ID NO: 31846 - RNA, 21 nt, synthetic construct
  source 1..21: mol_type = other RNA; note = Description of Artificial Sequence: Synthetic oligonucleotide
ttcccactcatatatgtaatt

SEQ ID NO: 31847 - RNA, 21 nt, synthetic construct
  source 1..21: mol_type = other RNA; note = Description of Artificial Sequence: Synthetic oligonucleotide
tgtcccactcatatatgtatt

SEQ ID NO: 31848 - RNA, 21 nt, synthetic construct
  source 1..21: mol_type = other RNA; note = Description of Artificial Sequence: Synthetic oligonucleotide
tggtcccactcatatatgttt

SEQ ID NO: 31849 - RNA, 21 nt, synthetic construct
  source 1..21: mol_type = other RNA; note = Description of Artificial Sequence: Synthetic oligonucleotide
ttggtcccactcatatatgtt

SEQ ID NO: 31850 - RNA, 21 nt, synthetic construct
  source 1..21: mol_type = other RNA; note = Description of Artificial Sequence: Synthetic oligonucleotide
tttggtcccactcatatattt

SEQ ID NO: 31851 - RNA, 21 nt, synthetic construct
  source 1..21: mol_type = other RNA; note = Description of Artificial Sequence: Synthetic oligonucleotide
ttttggtcccactcatatatt

SEQ ID NO: 31852 - RNA, 21 nt, synthetic construct
  source 1..21: mol_type = other RNA; note = Description of Artificial Sequence: Synthetic oligonucleotide
tttttggtcccactcatattt

SEQ ID NO: 31853 - RNA, 21 nt, synthetic construct
  source 1..21: mol_type = other RNA; note = Description of Artificial Sequence: Synthetic oligonucleotide
tcttttggtcccactcatatt

SEQ ID NO: 31854 - RNA, 21 nt, synthetic construct
  source 1..21: mol_type = other RNA; note = Description of Artificial Sequence: Synthetic oligonucleotide
tacttttggtcccactcattt

SEQ ID NO: 31855 - RNA, 21 nt, synthetic construct
  source 1..21: mol_type = other RNA; note = Description of Artificial Sequence: Synthetic oligonucleotide
ttacttttggtcccactcatt

SEQ ID NO: 31856 - RNA, 21 nt, synthetic construct
  source 1..21: mol_type = other RNA; note = Description of Artificial Sequence: Synthetic oligonucleotide
tgtacttttggtcccactctt

SEQ ID NO: 31857 - RNA, 21 nt, synthetic construct
  source 1..21: mol_type = other RNA; note = Description of Artificial Sequence: Synthetic oligonucleotide
tggtacttttggtcccacttt

SEQ ID NO: 31858 - RNA, 21 nt, synthetic construct
  source 1..21: mol_type = other RNA; note = Description of Artificial Sequence: Synthetic oligonucleotide
tcggtacttttggtcccactt

SEQ ID NO: 31859 - RNA, 21 nt, synthetic construct
  source 1..21: mol_type = other RNA; note = Description of Artificial Sequence: Synthetic oligonucleotide
ttcggtacttttggtcccatt

SEQ ID NO: 31860 - RNA, 21 nt, synthetic construct
  source 1..21: mol_type = other RNA; note = Description of Artificial Sequence: Synthetic oligonucleotide
tctcggtacttttggtccctt

SEQ ID NO: 31861 - RNA, 21 nt, synthetic construct
  source 1..21: mol_type = other RNA; note = Description of Artificial Sequence: Synthetic oligonucleotide
tactcggtacttttggtcctt

SEQ ID NO: 31862 - RNA, 21 nt, synthetic construct
  source 1..21: mol_type = other RNA; note = Description of Artificial Sequence: Synthetic oligonucleotide
taactcggtacttttggtctt

SEQ ID NO: 31863 - RNA, 21 nt, synthetic construct
  source 1..21: mol_type = other RNA; note = Description of Artificial Sequence: Synthetic oligonucleotide
tgaactcggtacttttggttt

SEQ ID NO: 31864 - RNA, 21 nt, synthetic construct
  source 1..21: mol_type = other RNA; note = Description of Artificial Sequence: Synthetic oligonucleotide
ttgaactcggtacttttggtt

SEQ ID NO: 31865 - RNA, 21 nt, synthetic construct
  source 1..21: mol_type = other RNA; note = Description of Artificial Sequence: Synthetic oligonucleotide
tttgaactcggtacttttgtt

SEQ ID NO: 31866 - RNA, 21 nt, synthetic construct
  source 1..21: mol_type = other RNA; note = Description of Artificial Sequence: Synthetic oligonucleotide
tgttgaactcggtactttttt

SEQ ID NO: 31867 - RNA, 21 nt, synthetic construct
  source 1..21: mol_type = other RNA; note = Description of Artificial Sequence: Synthetic oligonucleotide
ttgttgaactcggtacttttt

SEQ ID NO: 31868 - RNA, 21 nt, synthetic construct
  source 1..21: mol_type = other RNA; note = Description of Artificial Sequence: Synthetic oligonucleotide
tttgttgaactcggtactttt

SEQ ID NO: 31869 - RNA, 21 nt, synthetic construct
  source 1..21: mol_type = other RNA; note = Description of Artificial Sequence: Synthetic oligonucleotide
tgttgttgaactcggtacttt

SEQ ID NO: 31870 - RNA, 21 nt, synthetic construct
  source 1..21: mol_type = other RNA; note = Description of Artificial Sequence: Synthetic oligonucleotide
ttgttgttgaactcggtactt

SEQ ID NO: 31871 - RNA, 21 nt, synthetic construct
  source 1..21: mol_type = other RNA; note = Description of Artificial Sequence: Synthetic oligonucleotide
tgtgttgttgaactcggtatt

SEQ ID NO: 31872 - RNA, 21 nt, synthetic construct
  source 1..21: mol_type = other RNA; note = Description of Artificial Sequence: Synthetic oligonucleotide
tggtgttgttgaactcggttt

SEQ ID NO: 31873 - RNA, 21 nt, synthetic construct
  source 1..21: mol_type = other RNA; note = Description of Artificial Sequence: Synthetic oligonucleotide
tcggtgttgttgaactcggtt

SEQ ID NO: 31874 - RNA, 21 nt, synthetic construct
  source 1..21: mol_type = other RNA; note = Description of Artificial Sequence: Synthetic oligonucleotide
tacggtgttgttgaactcgtt

SEQ ID NO: 31875 - RNA, 21 nt, synthetic construct
  source 1..21: mol_type = other RNA; note = Description of Artificial Sequence: Synthetic oligonucleotide
tgacggtgttgttgaactctt

SEQ ID NO: 31876 - RNA, 21 nt, synthetic construct
  source 1..21: mol_type = other RNA; note = Description of Artificial Sequence: Synthetic oligonucleotide
tagacggtgttgttgaacttt

SEQ ID NO: 31877 - RNA, 21 nt, synthetic construct
  source 1..21: mol_type = other RNA; note = Description of Artificial Sequence: Synthetic oligonucleotide
tgagacggtgttgttgaactt

SEQ ID NO: 31878 - RNA, 21 nt, synthetic construct
  source 1..21: mol_type = other RNA; note = Description of Artificial Sequence: Synthetic oligonucleotide
tagagacggtgttgttgaatt

SEQ ID NO: 31879 - RNA, 21 nt, synthetic construct
  source 1..21: mol_type = other RNA; note = Description of Artificial Sequence: Synthetic oligonucleotide
taagagacggtgttgttgatt

SEQ ID NO: 31880 - RNA, 21 nt, synthetic construct
  source 1..21: mol_type = other RNA; note = Description of Artificial Sequence: Synthetic oligonucleotide
tcaagagacggtgttgttgtt

SEQ ID NO: 31881 - RNA, 21 nt, synthetic construct
  source 1..21: mol_type = other RNA; note = Description of Artificial Sequence: Synthetic oligonucleotide
tacaagagacggtgttgtttt

SEQ ID NO: 31882 - RNA, 21 nt, synthetic construct
  source 1..21: mol_type = other RNA; note = Description of Artificial Sequence: Synthetic oligonucleotide
ttacaagagacggtgttgttt

SEQ ID NO: 31883 - RNA, 21 nt, synthetic construct
  source 1..21: mol_type = other RNA; note = Description of Artificial Sequence: Synthetic oligonucleotide
tctacaagagacggtgttgtt

SEQ ID NO: 31884 - RNA, 21 nt, synthetic construct
  source 1..21: mol_type = other RNA; note = Description of Artificial Sequence: Synthetic oligonucleotide
tgctacaagagacggtgtttt

SEQ ID NO: 31885 - RNA, 21 nt, synthetic construct
  source 1..21: mol_type = other RNA; note = Description of Artificial Sequence: Synthetic oligonucleotide
ttgctacaagagacggtgttt

SEQ ID NO: 31886 - RNA, 21 nt, synthetic construct
  source 1..21: mol_type = other RNA; note = Description of Artificial Sequence: Synthetic oligonucleotide
tttgctacaagagacggtgtt

SEQ ID NO: 31887 - RNA, 21 nt, synthetic construct
  source 1..21: mol_type = other RNA; note = Description of Artificial Sequence: Synthetic oligonucleotide
tattgctacaagagacggttt

SEQ ID NO: 31888 - RNA, 21 nt, synthetic construct
  source 1..21: mol_type = other RNA; note = Description of Artificial Sequence: Synthetic oligonucleotide
tgattgctacaagagacggtt

SEQ ID NO: 31889 - RNA, 21 nt, synthetic construct
  source 1..21: mol_type = other RNA; note = Description of Artificial Sequence: Synthetic oligonucleotide
tcgattgctacaagagacgtt

SEQ ID NO: 31890 - RNA, 21 nt, synthetic construct
  source 1..21: mol_type = other RNA; note = Description of Artificial Sequence: Synthetic oligonucleotide
tccgattgctacaagagactt

SEQ ID NO: 31891 - RNA, 21 nt, synthetic construct
  source 1..21: mol_type = other RNA; note = Description of Artificial Sequence: Synthetic oligonucleotide
tgccgattgctacaagagatt

SEQ ID NO: 31892 - RNA, 21 nt, synthetic construct
  source 1..21: mol_type = other RNA; note = Description of Artificial Sequence: Synthetic oligonucleotide
tggccgattgctacaagagtt

SEQ ID NO: 31893 - RNA, 21 nt, synthetic construct
  source 1..21: mol_type = other RNA; note = Description of Artificial Sequence: Synthetic oligonucleotide
ttggccgattgctacaagatt

SEQ ID NO: 31894 - RNA, 21 nt, synthetic construct
  source 1..21: mol_type = other RNA; note = Description of Artificial Sequence: Synthetic oligonucleotide
tgtggccgattgctacaagtt

SEQ ID NO: 31895 - RNA, 21 nt, synthetic construct
  source 1..21: mol_type = other RNA; note = Description of Artificial Sequence: Synthetic oligonucleotide
ttgtggccgattgctacaatt

SEQ ID NO: 31896 - RNA, 21 nt, synthetic construct
  source 1..21: mol_type = other RNA; note = Description of Artificial Sequence: Synthetic oligonucleotide
tatgtggccgattgctacatt

SEQ ID NO: 31897 - RNA, 21 nt, synthetic construct
  source 1..21: mol_type = other RNA; note = Description of Artificial Sequence: Synthetic oligonucleotide
taatgtggccgattgctactt

SEQ ID NO: 31898 - RNA, 21 nt, synthetic construct
  source 1..21: mol_type = other RNA; note = Description of Artificial Sequence: Synthetic oligonucleotide
tcaatgtggccgattgctatt

SEQ ID NO: 31899 - RNA, 21 nt, synthetic construct
  source 1..21: mol_type = other RNA; note = Description of Artificial Sequence: Synthetic oligonucleotide
tgcaatgtggccgattgcttt

SEQ ID NO: 31900 - RNA, 21 nt, synthetic construct
  source 1..21: mol_type = other RNA; note = Description of Artificial Sequence: Synthetic oligonucleotide
tggcaatgtggccgattgctt

SEQ ID NO: 31901 - RNA, 21 nt, synthetic construct
  source 1..21: mol_type = other RNA; note = Description of Artificial Sequence: Synthetic oligonucleotide
taggcaatgtggccgattgtt

SEQ ID NO: 31902 - RNA, 21 nt, synthetic construct
  source 1..21: mol_type = other RNA; note = Description of Artificial Sequence: Synthetic oligonucleotide
taaggcaatgtggccgatttt

SEQ ID NO: 31903 - RNA, 21 nt, synthetic construct
  source 1..21: mol_type = other RNA; note = Description of Artificial Sequence: Synthetic oligonucleotide
ttaaggcaatgtggccgattt

SEQ ID NO: 31904 - RNA, 21 nt, synthetic construct
  source 1..21: mol_type = other RNA; note = Description of Artificial Sequence: Synthetic oligonucleotide
tgtaaggcaatgtggccgatt

SEQ ID NO: 31905 - RNA, 21 nt, synthetic construct
  source 1..21: mol_type = other RNA; note = Description of Artificial Sequence: Synthetic oligonucleotide
tagtaaggcaatgtggccgtt

SEQ ID NO: 31906 - RNA, 21 nt, synthetic construct
  source 1..21: mol_type = other RNA; note = Description of Artificial Sequence: Synthetic oligonucleotide
tcagtaaggcaatgtggcctt

SEQ ID NO: 31907 - RNA, 21 nt, synthetic construct
  source 1..21: mol_type = other RNA; note = Description of Artificial Sequence: Synthetic oligonucleotide
ttcagtaaggcaatgtggctt

SEQ ID NO: 31908 - RNA, 21 nt, synthetic construct
  source 1..21: mol_type = other RNA; note = Description of Artificial Sequence: Synthetic oligonucleotide
tttcagtaaggcaatgtggtt

SEQ ID NO: 31909 - RNA, 21 nt, synthetic construct
  source 1..21: mol_type = other RNA; note = Description of Artificial Sequence: Synthetic oligonucleotide
ttttcagtaaggcaatgtgtt

SEQ ID NO: 31910 - RNA, 21 nt, synthetic construct
  source 1..21: mol_type = other RNA; note = Description of Artificial Sequence: Synthetic oligonucleotide
tatttcagtaaggcaatgttt

SEQ ID NO: 31911 - RNA, 21 nt, synthetic construct
  source 1..21: mol_type = other RNA; note = Description of Artificial Sequence: Synthetic oligonucleotide
tgatttcagtaaggcaatgtt

SEQ ID NO: 31912 - RNA, 21 nt, synthetic construct
  source 1..21: mol_type = other RNA; note = Description of Artificial Sequence: Synthetic oligonucleotide
tggatttcagtaaggcaattt

SEQ ID NO: 31913 - RNA, 21 nt, synthetic construct
  source 1..21: mol_type = other RNA; note = Description of Artificial Sequence: Synthetic oligonucleotide
ttggatttcagtaaggcaatt

SEQ ID NO: 31914 - RNA, 21 nt, synthetic construct
  source 1..21: mol_type = other RNA; note = Description of Artificial Sequence: Synthetic oligonucleotide
tctggatttcagtaaggcatt

SEQ ID NO: 31915 - RNA, 21 nt, synthetic construct
  source 1..21: mol_type = other RNA; note = Description of Artificial Sequence: Synthetic oligonucleotide
ttctggatttcagtaaggctt

SEQ ID NO: 31916 - RNA, 21 nt, synthetic construct
  source 1..21: mol_type = other RNA; note = Description of Artificial Sequence: Synthetic oligonucleotide
tctctggatttcagtaaggtt

SEQ ID NO: 31917 - RNA, 21 nt, synthetic construct
  source 1..21: mol_type = other RNA; note = Description of Artificial Sequence: Synthetic oligonucleotide
tgctctggatttcagtaagtt

SEQ ID NO: 31918 - RNA, 21 nt, synthetic construct
  source 1..21: mol_type = other RNA; note = Description of Artificial Sequence: Synthetic oligonucleotide
tggctctggatttcagtaatt

SEQ ID NO: 31919 - RNA, 21 nt, synthetic construct
  source 1..21: mol_type = other RNA; note = Description of Artificial Sequence: Synthetic oligonucleotide
taggctctggatttcagtatt

SEQ ID NO: 31920 - RNA, 21 nt, synthetic construct
  source 1..21: mol_type = other RNA; note = Description of Artificial Sequence: Synthetic oligonucleotide
ttaggctctggatttcagttt

SEQ ID NO: 31921 - RNA, 21 nt, synthetic construct
  source 1..21: mol_type = other RNA; note = Description of Artificial Sequence: Synthetic oligonucleotide
tttaggctctggatttcagtt

SEQ ID NO: 31922 - RNA, 21 nt, synthetic construct
  source 1..21: mol_type = other RNA; note = Description of Artificial Sequence: Synthetic oligonucleotide
tgttaggctctggatttcatt

SEQ ID NO: 31923 - RNA, 21 nt, synthetic construct
  source 1..21: mol_type = other RNA; note = Description of Artificial Sequence: Synthetic oligonucleotide
tggttaggctctggatttctt

SEQ ID NO: 31924 - RNA, 21 nt, synthetic construct
  source 1..21: mol_type = other RNA; note = Description of Artificial Sequence: Synthetic oligonucleotide
taggttaggctctggattttt

SEQ ID NO: 31925 - RNA, 21 nt, synthetic construct
  source 1..21: mol_type = other RNA; note = Description of Artificial Sequence: Synthetic oligonucleotide
taaggttaggctctggatttt

SEQ ID NO: 31926 - RNA, 21 nt, synthetic construct
  source 1..21: mol_type = other RNA; note = Description of Artificial Sequence: Synthetic oligonucleotide
tgaaggttaggctctggattt

SEQ ID NO: 31927 - RNA, 21 nt, synthetic construct
  source 1..21: mol_type = other RNA; note = Description of Artificial Sequence: Synthetic oligonucleotide
ttgaaggttaggctctggatt

SEQ ID NO: 31928 - RNA, 21 nt, synthetic construct
  source 1..21: mol_type = other RNA; note = Description of Artificial Sequence: Synthetic oligonucleotide
tttgaaggttaggctctggtt

SEQ ID NO: 31929 - RNA, 21 nt, synthetic construct
  source 1..21: mol_type = other RNA; note = Description of Artificial Sequence: Synthetic oligonucleotide
tattgaaggttaggctctgtt

SEQ ID NO: 31930 - RNA, 21 nt, synthetic construct
  source 1..21: mol_type = other RNA; note = Description of Artificial Sequence: Synthetic oligonucleotide
tgattgaaggttaggctcttt

SEQ ID NO: 31931 - RNA, 21 nt, synthetic construct
  source 1..21: mol_type = other RNA; note = Description of Artificial Sequence: Synthetic oligonucleotide
tggattgaaggttaggctctt

SEQ ID NO: 31932 - RNA, 21 nt, synthetic construct
  source 1..21: mol_type = other RNA; note = Description of Artificial Sequence: Synthetic oligonucleotide
tgggattgaaggttaggcttt

SEQ ID NO: 31933 - RNA, 21 nt, synthetic construct
  source 1..21: mol_type = other RNA; note = Description of Artificial Sequence: Synthetic oligonucleotide
ttgggattgaaggttaggctt

SEQ ID NO: 31934 - RNA, 21 nt, synthetic construct
  source 1..21: mol_type = other RNA; note = Description of Artificial Sequence: Synthetic oligonucleotide
tgtgggattgaaggttaggtt

SEQ ID NO: 31935 - RNA, 21 nt, synthetic construct
  source 1..21: mol_type = other RNA; note = Description of Artificial Sequence: Synthetic oligonucleotide
tggtgggattgaaggttagtt

SEQ ID NO: 31936 - RNA, 21 nt, synthetic construct
  source 1..21: mol_type = other RNA; note = Description of Artificial Sequence: Synthetic oligonucleotide
tcggtgggattgaaggttatt

SEQ ID NO: 31937 - RNA, 21 nt, synthetic construct
  source 1..21: mol_type = other RNA; note = Description of Artificial Sequence: Synthetic oligonucleotide
tgcggtgggattgaaggtttt

SEQ ID NO: 31938 - RNA, 21 nt, synthetic construct
  source 1..21: mol_type = other RNA; note = Description of Artificial Sequence: Synthetic oligonucleotide
tggcggtgggattgaaggttt

SEQ ID NO: 31939 - RNA, 21 nt, synthetic construct
  source 1..21: mol_type = other RNA; note = Description of Artificial Sequence: Synthetic oligonucleotide
tcggcggtgggattgaaggtt

SEQ ID NO: 31940 - RNA, 21 nt, synthetic construct
  source 1..21: mol_type = other RNA; note = Description of Artificial Sequence: Synthetic oligonucleotide
tccggcggtgggattgaagtt

SEQ ID NO: 31941 - RNA, 21 nt, synthetic construct
  source 1..21: mol_type = other RNA; note = Description of Artificial Sequence: Synthetic oligonucleotide
tgccggcggtgggattgaatt

SEQ ID NO: 31942 - RNA, 21 nt, synthetic construct
  source 1..21: mol_type = other RNA; note = Description of Artificial Sequence: Synthetic oligonucleotide
tagccggcggtgggattgatt

SEQ ID NO: 31943 - RNA, 21 nt, synthetic construct
  source 1..21: mol_type = other RNA; note = Description of Artificial Sequence: Synthetic oligonucleotide
tcagccggcggtgggattgtt

SEQ ID NO: 31944 - RNA, 21 nt, synthetic construct
  source 1..21: mol_type = other RNA; note = Description of Artificial Sequence: Synthetic oligonucleotide
tgcagccggcggtgggatttt

SEQ ID NO: 31945 - RNA, 21 nt, synthetic construct
  source 1..21: mol_type = other RNA; note = Description of Artificial Sequence: Synthetic oligonucleotide
tcgcagccggcggtgggattt

SEQ ID NO: 31946 - RNA, 21 nt, synthetic construct
  source 1..21: mol_type = other RNA; note = Description of Artificial Sequence: Synthetic oligonucleotide
tgcgcagccggcggtgggatt

SEQ ID NO: 31947 - RNA, 21 nt, synthetic construct
  source 1..21: mol_type = other RNA; note = Description of Artificial Sequence: Synthetic oligonucleotide
tcgcgcagccggcggtgggtt

SEQ ID NO: 31948 - RNA, 21 nt, synthetic construct
  source 1..21: mol_type = other RNA; note = Description of Artificial Sequence: Synthetic oligonucleotide
tacgcgcagccggcggtggtt

SEQ ID NO: 31949 - RNA, 21 nt, synthetic construct
  source 1..21: mol_type = other RNA; note = Description of Artificial Sequence: Synthetic oligonucleotide
tgacgcgcagccggcggtgtt

SEQ ID NO: 31950 - RNA, 21 nt, synthetic construct
  source 1..21: mol_type = other RNA; note = Description of Artificial Sequence: Synthetic oligonucleotide
tcgacgcgcagccggcggttt

SEQ ID NO: 31951 - RNA, 21 nt, synthetic construct
  source 1..21: mol_type = other RNA; note = Description of Artificial Sequence: Synthetic oligonucleotide
tgcgacgcgcagccggcggtt

SEQ ID NO: 31952 - RNA, 21 nt, synthetic construct
  source 1..21: mol_type = other RNA; note = Description of Artificial Sequence: Synthetic oligonucleotide
tagcgacgcgcagccggcgtt

SEQ ID NO: 31953 - RNA, 21 nt, synthetic construct
  source 1..21: mol_type = other RNA; note = Description of Artificial Sequence: Synthetic oligonucleotide
tgagcgacgcgcagccggctt

SEQ ID NO: 31954 - RNA, 21 nt, synthetic construct
  source 1..21: mol_type = other RNA; note = Description of Artificial Sequence: Synthetic oligonucleotide
tcgagcgacgcgcagccggtt

SEQ ID NO: 31955 - RNA, 21 nt, synthetic construct
  source 1..21: mol_type = other RNA; note = Description of Artificial Sequence: Synthetic oligonucleotide
tgcgagcgacgcgcagccgtt

SEQ ID NO: 31956 - RNA, 21 nt, synthetic construct
  source 1..21: mol_type = other RNA; note = Description of Artificial Sequence: Synthetic oligonucleotide
tggcgagcgacgcgcagcctt

SEQ ID NO: 31957 - RNA, 21 nt, synthetic construct
  source 1..21: mol_type = other RNA; note = Description of Artificial Sequence: Synthetic oligonucleotide
ttggcgagcgacgcgcagctt

SEQ ID NO: 31958 - RNA, 21 nt, synthetic construct
  source 1..21: mol_type = other RNA; note = Description of Artificial Sequence: Synthetic oligonucleotide
tttggcgagcgacgcgcagtt

SEQ ID NO: 31959 - RNA, 21 nt, synthetic construct
  source 1..21: mol_type = other RNA; note = Description of Artificial Sequence: Synthetic oligonucleotide
ttttggcgagcgacgcgcatt

SEQ ID NO: 31960 - RNA, 21 nt, synthetic construct
  source 1..21: mol_type = other RNA; note = Description of Artificial Sequence: Synthetic oligonucleotide
tctttggcgagcgacgcgctt

SEQ ID NO: 31961 - RNA, 21 nt, synthetic construct
  source 1..21: mol_type = other RNA; note = Description of Artificial Sequence: Synthetic oligonucleotide
ttctttggcgagcgacgcgtt

SEQ ID NO: 31962 - RNA, 21 nt, synthetic construct
  source 1..21: mol_type = other RNA; note = Description of Artificial Sequence: Synthetic oligonucleotide
tttctttggcgagcgacgctt

SEQ ID NO: 31963 - RNA, 21 nt, synthetic construct
  source 1..21: mol_type = other RNA; note = Description of Artificial Sequence: Synthetic oligonucleotide
ttttctttggcgagcgacgtt

SEQ ID NO: 31964 - RNA, 21 nt, synthetic construct
  source 1..21: mol_type = other RNA; note = Description of Artificial Sequence: Synthetic oligonucleotide
tatttctttggcgagcgactt

SEQ ID NO: 31965 - RNA, 21 nt, synthetic construct
  source 1..21: mol_type = other RNA; note = Description of Artificial Sequence: Synthetic oligonucleotide
tcatttctttggcgagcgatt

SEQ ID NO: 31966 - RNA, 21 nt, synthetic construct
  source 1..21: mol_type = other RNA; note = Description of Artificial Sequence: Synthetic oligonucleotide
tacatttctttggcgagcgtt

SEQ ID NO: 31967 - RNA, 21 nt, synthetic construct
  source 1..21: mol_type = other RNA; note = Description of Artificial Sequence: Synthetic oligonucleotide
taacatttctttggcgagctt

SEQ ID NO: 31968 - RNA, 21 nt, synthetic construct
  source 1..21: mol_type = other RNA; note = Description of Artificial Sequence: Synthetic oligonucleotide
tgaacatttctttggcgagtt

SEQ ID NO: 31969 - RNA, 21 nt, synthetic construct
  source 1..21: mol_type = other RNA; note = Description of Artificial Sequence: Synthetic oligonucleotide
tcgaacatttctttggcgatt

SEQ ID NO: 31970 - RNA, 21 nt, synthetic construct
  source 1..21: mol_type = other RNA; note = Description of Artificial Sequence: Synthetic oligonucleotide
tgcgaacatttctttggcgtt

SEQ ID NO: 31971 - RNA, 21 nt, synthetic construct
  source 1..21: mol_type = other RNA; note = Description of Artificial Sequence: Synthetic oligonucleotide
tggcgaacatttctttggctt

SEQ ID NO: 31972 - RNA, 21 nt, synthetic construct
  source 1..21: mol_type = other RNA; note = Description of Artificial Sequence: Synthetic oligonucleotide
ttggcgaacatttctttggtt

SEQ ID NO: 31973 - RNA, 21 nt, synthetic construct
  source 1..21: mol_type = other RNA; note = Description of Artificial Sequence: Synthetic oligonucleotide
tatggcgaacatttctttgtt

SEQ ID NO: 31974 - RNA, 21 nt, synthetic construct
  source 1..21: mol_type = other RNA; note = Description of Artificial Sequence: Synthetic oligonucleotide
tcatggcgaacatttcttttt

SEQ ID NO: 31975 - RNA, 21 nt, synthetic construct
  source 1..21: mol_type = other RNA; note = Description of Artificial Sequence: Synthetic oligonucleotide
ttcatggcgaacatttctttt

SEQ ID NO: 31976 - RNA, 21 nt, synthetic construct
  source 1..21: mol_type = other RNA; note = Description of Artificial Sequence: Synthetic oligonucleotide
tttcatggcgaacatttcttt

SEQ ID NO: 31977 - RNA, 21 nt, synthetic construct
  source 1..21: mol_type = other RNA; note = Description of Artificial Sequence: Synthetic oligonucleotide
ttttcatggcgaacatttctt

SEQ ID NO: 31978 - RNA, 21 nt, synthetic construct
  source 1..21: mol_type = other RNA; note = Description of Artificial Sequence: Synthetic oligonucleotide
tttttcatggcgaacattttt

SEQ ID NO: 31979 - RNA, 21 nt, synthetic construct
  source 1..21: mol_type = other RNA; note = Description of Artificial Sequence: Synthetic oligonucleotide
tgttttcatggcgaacatttt

SEQ ID NO: 31980 - RNA, 21 nt, synthetic construct
  source 1..21: mol_type = other RNA; note = Description of Artificial Sequence: Synthetic oligonucleotide
tagttttcatggcgaacattt

SEQ ID NO: 31981 - RNA, 21 nt, synthetic construct
  source 1..21: mol_type = other RNA; note = Description of Artificial Sequence: Synthetic oligonucleotide
ttagttttcatggcgaacatt

SEQ ID NO: 31982 - RNA, 21 nt, synthetic construct
  source 1..21: mol_type = other RNA; note = Description of Artificial Sequence: Synthetic oligonucleotide
tttagttttcatggcgaactt

SEQ ID NO: 31983 - RNA, 21 nt, synthetic construct
  source 1..21: mol_type = other RNA; note = Description of Artificial Sequence: Synthetic oligonucleotide
tcttagttttcatggcgaatt

SEQ ID NO: 31984 - RNA, 21 nt, synthetic construct
  source 1..21: mol_type = other RNA; note = Description of Artificial Sequence: Synthetic oligonucleotide
tccttagttttcatggcgatt

SEQ ID NO: 31985 - RNA, 21 nt, synthetic construct
  source 1..21: mol_type = other RNA; note = Description of Artificial Sequence: Synthetic oligonucleotide
tgccttagttttcatggcgtt

SEQ ID NO: 31986 - RNA, 21 nt, synthetic construct
  source 1..21: mol_type = other RNA; note = Description of Artificial Sequence: Synthetic oligonucleotide
tagccttagttttcatggctt

SEQ ID NO: 31987 - RNA, 21 nt, synthetic construct
  source 1..21: mol_type = other RNA; note = Description of Artificial Sequence: Synthetic oligonucleotide
tcagccttagttttcatggtt

SEQ ID NO: 31988 - RNA, 21 nt, synthetic construct
  source 1..21: mol_type = other RNA; note = Description of Artificial Sequence: Synthetic oligonucleotide
tgcagccttagttttcatgtt

SEQ ID NO: 31989 - RNA, 21 nt, synthetic construct
  source 1..21: mol_type = other RNA; note = Description of Artificial Sequence: Synthetic oligonucleotide
tggcagccttagttttcattt

SEQ ID NO: 31990 - RNA, 21 nt, synthetic construct
  source 1..21: mol_type = other RNA; note = Description of Artificial Sequence: Synthetic oligonucleotide
taggcagccttagttttcatt

SEQ ID NO: 31991 - RNA, 21 nt, synthetic construct
  source 1..21: mol_type = other RNA; note = Description of Artificial Sequence: Synthetic oligonucleotide
taaggcagccttagttttctt

SEQ ID NO: 31992 - RNA, 21 nt, synthetic construct
  source 1..21: mol_type = other RNA; note = Description of Artificial Sequence: Synthetic oligonucleotide
ttaaggcagccttagtttttt

SEQ ID NO: 31993 - RNA, 21 nt, synthetic construct
  source 1..21: mol_type = other RNA; note = Description of Artificial Sequence: Synthetic oligonucleotide
tctaaggcagccttagttttt

SEQ ID NO: 31994 - RNA, 21 nt, synthetic construct
  source 1..21: mol_type = other RNA; note = Description of Artificial Sequence: Synthetic oligonucleotide
tgctaaggcagccttagtttt

SEQ ID NO: 31995 - RNA, 21 nt, synthetic construct
  source 1..21: mol_type = other RNA; note = Description of Artificial Sequence: Synthetic oligonucleotide
tagctaaggcagccttagttt

SEQ ID NO: 31996 - RNA, 21 nt, synthetic construct
  source 1..21: mol_type = other RNA; note = Description of Artificial Sequence: Synthetic oligonucleotide
ttagctaaggcagccttagtt

SEQ ID NO: 31997 - RNA, 21 nt, synthetic construct
  source 1..21: mol_type = other RNA; note = Description of Artificial Sequence: Synthetic oligonucleotide
tatagctaaggcagccttatt

SEQ ID NO: 31998 - RNA, 21 nt, synthetic construct
  source 1..21: mol_type = other RNA; note = Description of Artificial Sequence: Synthetic oligonucleotide
tgatagctaaggcagcctttt

SEQ ID NO: 31999 - RNA, 21 nt, synthetic construct
  source 1..21: mol_type = other RNA; note = Description of Artificial Sequence: Synthetic oligonucleotide
tagatagctaaggcagccttt

SEQ ID NO: 32000 - RNA, 21 nt, synthetic construct
  source 1..21: mol_type = other RNA; note = Description of Artificial Sequence: Synthetic oligonucleotide
tcagatagctaaggcagcctt

SEQ ID NO: 32001 - RNA, 21 nt, synthetic construct
  source 1..21: mol_type = other RNA; note = Description of Artificial Sequence: Synthetic oligonucleotide
tccagatagctaaggcagctt

SEQ ID NO: 32002 - RNA, 21 nt, synthetic construct
  source 1..21: mol_type = other RNA; note = Description of Artificial Sequence: Synthetic oligonucleotide
taccagatagctaaggcagtt

SEQ ID NO: 32003 - RNA, 21 nt, synthetic construct
  source 1..21: mol_type = other RNA; note = Description of Artificial Sequence: Synthetic oligonucleotide
tcaccagatagctaaggcatt

SEQ ID NO: 32004 - RNA, 21 nt, synthetic construct
  source 1..21: mol_type = other RNA; note = Description of Artificial Sequence: Synthetic oligonucleotide
tgcaccagatagctaaggctt

SEQ ID NO: 32005 - RNA, 21 nt, synthetic construct
  source 1..21: mol_type = other RNA; note = Description of Artificial Sequence: Synthetic oligonucleotide
tggcaccagatagctaaggtt

SEQ ID NO: 32006 - RNA, 21 nt, synthetic construct
  source 1..21: mol_type = other RNA; note = Description of Artificial Sequence: Synthetic oligonucleotide
tgggcaccagatagctaagtt

SEQ ID NO: 32007 - RNA, 21 nt, synthetic construct
  source 1..21: mol_type = other RNA; note = Description of Artificial Sequence: Synthetic oligonucleotide
ttgggcaccagatagctaatt

SEQ ID NO: 32008 - RNA, 21 nt, synthetic construct
  source 1..21: mol_type = other RNA; note = Description of Artificial Sequence: Synthetic oligonucleotide
tctgggcaccagatagctatt

SEQ ID NO: 32009 - RNA, 21 nt, synthetic construct
  source 1..21: mol_type = other RNA; note = Description of Artificial Sequence: Synthetic oligonucleotide
tcctgggcaccagatagcttt

SEQ ID NO: 32010 - RNA, 21 nt, synthetic construct
  source 1..21: mol_type = other RNA; note = Description of Artificial Sequence: Synthetic oligonucleotide
tgcctgggcaccagatagctt

SEQ ID NO: 32011 - RNA, 21 nt, synthetic construct
  source 1..21: mol_type = other RNA; note = Description of Artificial Sequence: Synthetic oligonucleotide
tagcctgggcaccagatagtt

SEQ ID NO: 32012 - RNA, 21 nt, synthetic construct
  source 1..21: mol_type = other RNA; note = Description of Artificial Sequence: Synthetic oligonucleotide
ttagcctgggcaccagatatt

SEQ ID NO: 32013 - RNA, 21 nt, synthetic construct
  source 1..21: mol_type = other RNA; note = Description of Artificial Sequence: Synthetic oligonucleotide
tatagcctgggcaccagattt

SEQ ID NO: 32014 - RNA, 21 nt, synthetic construct
  source 1..21: mol_type = other RNA; note = Description of Artificial Sequence: Synthetic oligonucleotide
taatagcctgggcaccagatt

SEQ ID NO: 32015 - RNA, 21 nt, synthetic construct
  source 1..21: mol_type = other RNA; note = Description of Artificial Sequence: Synthetic oligonucleotide
tgaatagcctgggcaccagtt

SEQ ID NO: 32016 - RNA, 21 nt, synthetic construct
  source 1..21: mol_type = other RNA; note = Description of Artificial Sequence: Synthetic oligonucleotide
tcgaatagcctgggcaccatt

SEQ ID NO: 32017 - RNA, 21 nt, synthetic construct
  source 1..21: mol_type = other RNA; note = Description of Artificial Sequence: Synthetic oligonucleotide
tccgaatagcctgggcacctt

SEQ ID NO: 32018 - RNA, 21 nt, synthetic construct
  source 1..21: mol_type = other RNA; note = Description of Artificial Sequence: Synthetic oligonucleotide
ttccgaatagcctgggcactt

SEQ ID NO: 32019 - RNA, 21 nt, synthetic construct
  source 1..21: mol_type = other RNA; note = Description of Artificial Sequence: Synthetic oligonucleotide
tttccgaatagcctgggcatt

SEQ ID NO: 32020 - RNA, 21 nt, synthetic construct
  source 1..21: mol_type = other RNA; note = Description of Artificial Sequence: Synthetic oligonucleotide
ttttccgaatagcctgggctt

SEQ ID NO: 32021 - RNA, 21 nt, synthetic construct
  source 1..21: mol_type = other RNA; note = Description of Artificial Sequence: Synthetic oligonucleotide
tgtttccgaatagcctgggtt

SEQ ID NO: 32022 - RNA, 21 nt, synthetic construct
  source 1..21: mol_type = other RNA; note = Description of Artificial Sequence: Synthetic oligonucleotide
tagtttccgaatagcctggtt

SEQ ID NO: 32023 - RNA, 21 nt, synthetic construct
  source 1..21: mol_type = other RNA; note = Description of Artificial Sequence: Synthetic oligonucleotide
tgagtttccgaatagcctgtt

SEQ ID NO: 32024 - RNA, 21 nt, synthetic construct
  source 1..21: mol_type = other RNA; note = Description of Artificial Sequence: Synthetic oligonucleotide
ttgagtttccgaatagccttt

SEQ ID NO: 32025 - RNA, 21 nt, synthetic construct
  source 1..21: mol_type = other RNA; note = Description of Artificial Sequence: Synthetic oligonucleotide
tctgagtttccgaatagcctt

SEQ ID NO: 32026 - RNA, 21 nt, synthetic construct
  source 1..21: mol_type = other RNA; note = Description of Artificial Sequence: Synthetic oligonucleotide
ttctgagtttccgaatagctt

SEQ ID NO: 32027 - RNA, 21 nt, synthetic construct
  source 1..21: mol_type = other RNA; note = Description of Artificial Sequence: Synthetic oligonucleotide
tatctgagtttccgaatagtt

SEQ ID NO: 32028 - RNA, 21 nt, synthetic construct
  source 1..21: mol_type = other RNA; note = Description of Artificial Sequence: Synthetic oligonucleotide
ttatctgagtttccgaatatt

SEQ ID NO: 32029 - RNA, 21 nt, synthetic construct
  source 1..21: mol_type = other RNA; note = Description of Artificial Sequence: Synthetic oligonucleotide
tttatctgagtttccgaattt

SEQ ID NO: 32030 - RNA, 21 nt, synthetic construct
  source 1..21: mol_type = other RNA; note = Description of Artificial Sequence: Synthetic oligonucleotide
ttttatctgagtttccgaatt

SEQ ID NO: 32031 - RNA, 21 nt, synthetic construct
  source 1..21: mol_type = other RNA; note = Description of Artificial Sequence: Synthetic oligonucleotide
tatttatctgagtttccgatt

SEQ ID NO: 32032 - RNA, 21 nt, synthetic construct
  source 1..21: mol_type = other RNA; note = Description of Artificial Sequence: Synthetic oligonucleotide
tcatttatctgagtttccgtt

SEQ ID NO: 32033 - RNA, 21 nt, synthetic construct
  source 1..21: mol_type = other RNA; note = Description of Artificial Sequence: Synthetic oligonucleotide
tgcatttatctgagtttcctt

SEQ ID NO: 32034 - RNA, 21 nt, synthetic construct
  source 1..21: mol_type = other RNA; note = Description of Artificial Sequence: Synthetic oligonucleotide
tagcatttatctgagtttctt

SEQ ID NO: 32035 - RNA, 21 nt, synthetic construct
  source 1..21: mol_type = other RNA; note = Description of Artificial Sequence: Synthetic oligonucleotide
ttagcatttatctgagttttt

SEQ ID NO: 32036 - RNA, 21 nt, synthetic construct
  source 1..21: mol_type = other RNA; note = Description of Artificial Sequence: Synthetic oligonucleotide
tgtagcatttatctgagtttt

SEQ ID NO: 32037 - RNA, 21 nt, synthetic construct
  source 1..21: mol_type = other RNA; note = Description of Artificial Sequence: Synthetic oligonucleotide
tagtagcatttatctgagttt

SEQ ID NO: 32038 - RNA, 21 nt, synthetic construct
  source 1..21: mol_type = other RNA; note = Description of Artificial Sequence: Synthetic oligonucleotide
tgagtagcatttatctgagtt

SEQ ID NO: 32039 - RNA, 21 nt, synthetic construct
  source 1..21: mol_type = other RNA; note = Description of Artificial Sequence: Synthetic oligonucleotide
ttgagtagcatttatctgatt

SEQ ID NO: 32040 - RNA, 21 nt, synthetic construct
  source 1..21: mol_type = other RNA; note = Description of Artificial Sequence: Synthetic oligonucleotide
tctgagtagcatttatctgtt

SEQ ID NO: 32041 - RNA, 21 nt, synthetic construct
  source 1..21: mol_type = other RNA; note = Description of Artificial Sequence: Synthetic oligonucleotide
tcctgagtagcatttatcttt

SEQ ID NO: 32042 - RNA, 21 nt, synthetic construct
  source 1..21: mol_type = other RNA; note = Description of Artificial Sequence: Synthetic oligonucleotide
tgcctgagtagcatttatctt

SEQ ID NO: 32043 - RNA, 21 nt, synthetic construct
  source 1..21: mol_type = other RNA; note = Description of Artificial Sequence: Synthetic oligonucleotide
ttgcctgagtagcatttattt

SEQ ID NO: 32044 - RNA, 21 nt, synthetic construct
  source 1..21: mol_type = other RNA; note = Description of Artificial Sequence: Synthetic oligonucleotide
tttgcctgagtagcatttatt

SEQ ID NO: 32045 - RNA, 21 nt, synthetic construct
  source 1..21: mol_type = other RNA; note = Description of Artificial Sequence: Synthetic oligonucleotide
tattgcctgagtagcattttt

SEQ ID NO: 32046 - RNA, 21 nt, synthetic construct
  source 1..21: mol_type = other RNA; note = Description of Artificial Sequence: Synthetic oligonucleotide
tcattgcctgagtagcatttt

SEQ ID NO: 32047 - RNA, 21 nt, synthetic construct
  source 1..21: mol_type = other RNA; note = Description of Artificial Sequence: Synthetic oligonucleotide
ttcattgcctgagtagcattt

SEQ ID NO: 32048 - RNA, 21 nt, synthetic construct
  source 1..21: mol_type = other RNA; note = Description of Artificial Sequence: Synthetic oligonucleotide
tttcattgcctgagtagcatt

SEQ ID NO: 32049 - RNA, 21 nt, synthetic construct
  source 1..21: mol_type = other RNA; note = Description of Artificial Sequence: Synthetic oligonucleotide
tcttcattgcctgagtagctt

SEQ ID NO: 32050 - RNA, 21 nt, synthetic construct
  source 1..21: mol_type = other RNA; note = Description of Artificial Sequence: Synthetic oligonucleotide
ttcttcattgcctgagtagtt

SEQ ID NO: 32051 - RNA, 21 nt, synthetic construct
  source 1..21: mol_type = other RNA; note = Description of Artificial Sequence: Synthetic oligonucleotide
tttcttcattgcctgagtatt

SEQ ID NO: 32052 - RNA, 21 nt, synthetic construct
  source 1..21: mol_type = other RNA; note = Description of Artificial Sequence: Synthetic oligonucleotide
tcttcttcattgcctgagttt

SEQ ID NO: 32053 - RNA, 21 nt, synthetic construct
  source 1..21: mol_type = other RNA; note = Description of Artificial Sequence: Synthetic oligonucleotide
ttcttcttcattgcctgagtt

SEQ ID NO: 32054 - RNA, 21 nt, synthetic construct
  source 1..21: mol_type = other RNA; note = Description of Artificial Sequence: Synthetic oligonucleotide
tctcttcttcattgcctgatt

SEQ ID NO: 32055 - RNA, 21 nt, synthetic construct
  source 1..21: mol_type = other RNA; note = Description of Artificial Sequence: Synthetic oligonucleotide
tcctcttcttcattgcctgtt

SEQ ID NO: 32056 - RNA, 21 nt, synthetic construct
  source 1..21: mol_type = other RNA; note = Description of Artificial Sequence: Synthetic oligonucleotide
ttcctcttcttcattgccttt

SEQ ID NO: 32057 - RNA, 21 nt, synthetic construct
  source 1..21: mol_type = other RNA; note = Description of Artificial Sequence: Synthetic oligonucleotide
tctcctcttcttcattgcctt

SEQ ID NO: 32058 - RNA, 21 nt, synthetic construct
  source 1..21: mol_type = other RNA; note = Description of Artificial Sequence: Synthetic oligonucleotide
ttctcctcttcttcattgctt

SEQ ID NO: 32059 - RNA, 21 nt, synthetic construct
  source 1..21: mol_type = other RNA; note = Description of Artificial Sequence: Synthetic oligonucleotide
tttctcctcttcttcattgtt

SEQ ID NO: 32060 - RNA, 21 nt, synthetic construct
  source 1..21: mol_type = other RNA; note = Description of Artificial Sequence: Synthetic oligonucleotide
ttttctcctcttcttcatttt

SEQ ID NO: 32061 - RNA, 21 nt, synthetic construct
  source 1..21: mol_type = other RNA; note = Description of Artificial Sequence: Synthetic oligonucleotide
tttttctcctcttcttcattt

SEQ ID NO: 32062 - RNA, 21 nt, synthetic construct
  source 1..21: mol_type = other RNA; note = Description of Artificial Sequence: Synthetic oligonucleotide
ttttttctcctcttcttcatt

SEQ ID NO: 32063 - RNA, 21 nt, synthetic construct
  source 1..21: mol_type = other RNA; note = Description of Artificial Sequence: Synthetic oligonucleotide
tctttttctcctcttcttctt

SEQ ID NO: 32064 - RNA, 21 nt, synthetic construct
  source 1..21: mol_type = other RNA; note = Description of Artificial Sequence: Synthetic oligonucleotide
tcctttttctcctcttctttt

SEQ ID NO: 32065 - RNA, 21 nt, synthetic construct
  source 1..21: mol_type = other RNA; note = Description of Artificial Sequence: Synthetic oligonucleotide
ttcctttttctcctcttcttt

SEQ ID NO: 32066 - RNA, 21 nt, synthetic construct
  source 1..21: mol_type = other RNA; note = Description of Artificial Sequence: Synthetic oligonucleotide
tttcctttttctcctcttctt

SEQ ID NO: 32067 - RNA, 21 nt, synthetic construct
  source 1..21: mol_type = other RNA; note = Description of Artificial Sequence: Synthetic oligonucleotide
ttttcctttttctcctctttt

SEQ ID NO: 32068 - RNA, 21 nt, synthetic construct
  source 1..21: mol_type = other RNA; note = Description of Artificial Sequence: Synthetic oligonucleotide
tctttcctttttctcctcttt

SEQ ID NO: 32069 - RNA, 21 nt, synthetic construct
  source 1..21: mol_type = other RNA; note = Description of Artificial Sequence: Synthetic oligonucleotide
tactttcctttttctcctctt

SEQ ID NO: 32070 - RNA, 21 nt, synthetic construct
  source 1..21: mol_type = other RNA; note = Description of Artificial Sequence: Synthetic oligonucleotide
tgactttcctttttctccttt

SEQ ID NO: 32071 - RNA, 21 nt, synthetic construct
  source 1..21: mol_type = other RNA; note = Description of Artificial Sequence: Synthetic oligonucleotide
ttgactttcctttttctcctt

SEQ ID NO: 32072 - RNA, 21 nt, synthetic construct
  source 1..21: mol_type = other RNA; note = Description of Artificial Sequence: Synthetic oligonucleotide
tgtgactttcctttttctctt

SEQ ID NO: 32073 - RNA, 21 nt, synthetic construct
  source 1..21: mol_type = other RNA; note = Description of Artificial Sequence: Synthetic oligonucleotide
ttgtgactttcctttttcttt

SEQ ID NO: 32074 - RNA, 21 nt, synthetic construct
  source 1..21: mol_type = other RNA; note = Description of Artificial Sequence: Synthetic oligonucleotide
tttgtgactttcctttttctt

SEQ ID NO: 32075 - RNA, 21 nt, synthetic construct
  source 1..21: mol_type = other RNA; note = Description of Artificial Sequence: Synthetic oligonucleotide
tgttgtgactttccttttttt

SEQ ID NO: 32076 - RNA, 21 nt, synthetic construct
  source 1..21: mol_type = other RNA; note = Description of Artificial Sequence: Synthetic oligonucleotide
tggttgtgactttcctttttt

SEQ ID NO: 32077 - RNA, 21 nt, synthetic construct
  source 1..21: mol_type = other RNA; note = Description of Artificial Sequence: Synthetic oligonucleotide
ttggttgtgactttccttttt

SEQ ID NO: 32078 - RNA, 21 nt, synthetic construct
  source 1..21: mol_type = other RNA; note = Description of Artificial Sequence: Synthetic oligonucleotide
tttggttgtgactttcctttt

SEQ ID NO: 32079 - RNA, 21 nt, synthetic construct
  source 1..21: mol_type = other RNA; note = Description of Artificial Sequence: Synthetic oligonucleotide
tattggttgtgactttccttt

SEQ ID NO: 32080 - RNA, 21 nt, synthetic construct
  source 1..21: mol_type = other RNA; note = Description of Artificial Sequence: Synthetic oligonucleotide
ttattggttgtgactttcctt

SEQ ID NO: 32081 - RNA, 21 nt, synthetic construct
  source 1..21: mol_type = other RNA; note = Description of Artificial Sequence: Synthetic oligonucleotide
tttattggttgtgactttctt

SEQ ID NO: 32082 - RNA, 21 nt, synthetic construct
  source 1..21: mol_type = other RNA; note = Description of Artificial Sequence: Synthetic oligonucleotide
ttttattggttgtgacttttt

SEQ ID NO: 32083 - RNA, 21 nt, synthetic construct
  source 1..21: mol_type = other RNA; note = Description of Artificial Sequence: Synthetic oligonucleotide
tatttattggttgtgactttt

SEQ ID NO: 32084 - RNA, 21 nt, synthetic construct
  source 1..21: mol_type = other RNA; note = Description of Artificial Sequence: Synthetic oligonucleotide
tcatttattggttgtgacttt

SEQ ID NO: 32085 - RNA, 21 nt, synthetic construct
  source 1..21: mol_type = other RNA; note = Description of Artificial Sequence: Synthetic oligonucleotide
tacatttattggttgtgactt

SEQ ID NO: 32086 - RNA, 21 nt, synthetic construct
  source 1..21: mol_type = other RNA; note = Description of Artificial Sequence: Synthetic oligonucleotide
tgacatttattggttgtgatt

SEQ ID NO: 32087 - RNA, 21 nt, synthetic construct
  source 1..21: mol_type = other RNA; note = Description of Artificial Sequence: Synthetic oligonucleotide
tagacatttattggttgtgtt

SEQ ID NO: 32088 - RNA, 21 nt, synthetic construct
  source 1..21: mol_type = other RNA; note = Description of Artificial Sequence: Synthetic oligonucleotide
tcagacatttattggttgttt

SEQ ID NO: 32089 - RNA, 21 nt, synthetic construct
  source 1..21: mol_type = other RNA; note = Description of Artificial Sequence: Synthetic oligonucleotide
tccagacatttattggttgtt

SEQ ID NO: 32090 - RNA, 21 nt, synthetic construct
  source 1..21: mol_type = other RNA; note = Description of Artificial Sequence: Synthetic oligonucleotide
ttccagacatttattggtttt

SEQ ID NO: 32091 - RNA, 21 nt, synthetic construct
  source 1..21: mol_type = other RNA; note = Description of Artificial Sequence: Synthetic oligonucleotide
tttccagacatttattggttt

SEQ ID NO: 32092 - RNA, 21 nt, synthetic construct
  source 1..21: mol_type = other RNA; note = Description of Artificial Sequence: Synthetic oligonucleotide
tgttccagacatttattggtt

SEQ ID NO: 32093 - RNA, 21 nt, synthetic construct
  source 1..21: mol_type = other RNA; note = Description of Artificial Sequence: Synthetic oligonucleotide
ttgttccagacatttattgtt

SEQ ID NO: 32094 - RNA, 21 nt, synthetic construct
  source 1..21: mol_type = other RNA; note = Description of Artificial Sequence: Synthetic oligonucleotide
tttgttccagacatttatttt

SEQ ID NO: 32095 - RNA, 21 nt, synthetic construct
  source 1..21: mol_type = other RNA; note = Description of Artificial Sequence: Synthetic oligonucleotide
tcttgttccagacatttattt

SEQ ID NO: 32096 - RNA, 21 nt, synthetic construct
  source 1..21: mol_type = other RNA; note = Description of Artificial Sequence: Synthetic oligonucleotide
tacttgttccagacatttatt

SEQ ID NO: 32097 - RNA, 21 nt, synthetic construct
  source 1..21: mol_type = other RNA; note = Description of Artificial Sequence: Synthetic oligonucleotide
tcacttgttccagacattttt

SEQ ID NO: 32098 - RNA, 21 nt, synthetic construct
  source 1..21: mol_type = other RNA; note = Description of Artificial Sequence: Synthetic oligonucleotide
tacacttgttccagacatttt

SEQ ID NO: 32099 - RNA, 21 nt, synthetic construct
  source 1..21: mol_type = other RNA; note = Description of Artificial Sequence: Synthetic oligonucleotide
tgacacttgttccagacattt

SEQ ID NO: 32100 - RNA, 21 nt, synthetic construct
  source 1..21: mol_type = other RNA; note = Description of Artificial Sequence: Synthetic oligonucleotide
ttgacacttgttccagacatt

SEQ ID NO: 32101 - RNA, 21 nt, synthetic construct
  source 1..21: mol_type = other RNA; note = Description of Artificial Sequence: Synthetic oligonucleotide
tgtgacacttgttccagactt

SEQ ID NO: 32102 - RNA, 21 nt, synthetic construct
  source 1..21: mol_type = other RNA; note = Description of Artificial Sequence: Synthetic oligonucleotide
ttgtgacacttgttccagatt

SEQ ID NO: 32103 - RNA, 21 nt, synthetic construct
  source 1..21: mol_type = other RNA; note = Description of Artificial Sequence: Synthetic oligonucleotide
tttgtgacacttgttccagtt

SEQ ID NO: 32104 - RNA, 21 nt, synthetic construct
  source 1..21: mol_type = other RNA; note = Description of Artificial Sequence: Synthetic oligonucleotide
tattgtgacacttgttccatt

SEQ ID NO: 32105 - RNA, 21 nt, synthetic construct
  source 1..21: mol_type = other RNA; note = Description of Artificial Sequence: Synthetic oligonucleotide
taattgtgacacttgttcctt

SEQ ID NO: 32106 - RNA, 21 nt, synthetic construct
  source 1..21: mol_type = other RNA; note = Description of Artificial Sequence: Synthetic oligonucleotide
ttaattgtgacacttgttctt

SEQ ID NO: 32107 - RNA, 21 nt, synthetic construct
  source 1..21: mol_type = other RNA; note = Description of Artificial Sequence: Synthetic oligonucleotide
tgtaattgtgacacttgtttt

SEQ ID NO: 32108 - RNA, 21 nt, synthetic construct
  source 1..21: mol_type = other RNA; note = Description of Artificial Sequence: Synthetic oligonucleotide
ttgtaattgtgacacttgttt

SEQ ID NO: 32109 - RNA, 21 nt, synthetic construct
  source 1..21: mol_type = other RNA; note = Description of Artificial Sequence: Synthetic oligonucleotide
tttgtaattgtgacacttgtt

SEQ ID NO: 32110 - RNA, 21 nt, synthetic construct
  source 1..21: mol_type = other RNA; note = Description of Artificial Sequence: Synthetic oligonucleotide
tcttgtaattgtgacactttt

SEQ ID NO: 32111 - RNA, 21 nt, synthetic construct
  source 1..21: mol_type = other RNA; note = Description of Artificial Sequence: Synthetic oligonucleotide
tccttgtaattgtgacacttt

SEQ ID NO: 32112 - RNA, 21 nt, synthetic construct
  source 1..21: mol_type = other RNA; note = Description of Artificial Sequence: Synthetic oligonucleotide
ttccttgtaattgtgacactt

SEQ ID NO: 32113 - RNA, 21 nt, synthetic construct
  source 1..21: mol_type = other RNA; note = Description of Artificial Sequence: Synthetic oligonucleotide
tatccttgtaattgtgacatt

SEQ ID NO: 32114 - RNA, 21 nt, synthetic construct
  source 1..21: mol_type = other RNA; note = Description of Artificial Sequence: Synthetic oligonucleotide
taatccttgtaattgtgactt

SEQ ID NO: 32115 - RNA, 21 nt, synthetic construct
  source 1..21: mol_type = other RNA; note = Description of Artificial Sequence: Synthetic oligonucleotide
tcaatccttgtaattgtgatt

SEQ ID NO: 32116 - RNA, 21 nt, synthetic construct
  source 1..21: mol_type = other RNA; note = Description of Artificial Sequence: Synthetic oligonucleotide
tacaatccttgtaattgtgtt

SEQ ID NO: 32117 - RNA, 21 nt, synthetic construct
  source 1..21: mol_type = other RNA; note = Description of Artificial Sequence: Synthetic oligonucleotide
tcacaatccttgtaattgttt

SEQ ID NO: 32118 - RNA, 21 nt, synthetic construct
  source 1..21: mol_type = other RNA; note = Description of Artificial Sequence: Synthetic oligonucleotide
tccacaatccttgtaattgtt

SEQ ID NO: 32119 - RNA, 21 nt, synthetic construct
  source 1..21: mol_type = other RNA; note = Description of Artificial Sequence: Synthetic oligonucleotide
tgccacaatccttgtaatttt

SEQ ID NO: 32120 - RNA, 21 nt, synthetic construct
  source 1..21: mol_type = other RNA; note = Description of Artificial Sequence: Synthetic oligonucleotide
tcgccacaatccttgtaattt

SEQ ID NO: 32121 - RNA, 21 nt, synthetic construct
  source 1..21: mol_type = other RNA; note = Description of Artificial Sequence: Synthetic oligonucleotide
tacgccacaatccttgtaatt

SEQ ID NO: 32122 - RNA, 21 nt, synthetic construct
  source 1..21: mol_type = other RNA; note = Description of Artificial Sequence: Synthetic oligonucleotide
tgacgccacaatccttgtatt

SEQ ID NO: 32123 - RNA, 21 nt, synthetic construct
  source 1..21: mol_type = other RNA; note = Description of Artificial Sequence: Synthetic oligonucleotide
tcgacgccacaatccttgttt

SEQ ID NO: 32124 - RNA, 21 nt, synthetic construct
  source 1..21: mol_type = other RNA; note = Description of Artificial Sequence: Synthetic oligonucleotide
tgcgacgccacaatccttgtt

SEQ ID NO: 32125 - RNA, 21 nt, synthetic construct
  source 1..21: mol_type = other RNA; note = Description of Artificial Sequence: Synthetic oligonucleotide
tagcgacgccacaatcctttt

SEQ ID NO: 32126 - RNA, 21 nt, synthetic construct
  source 1..21: mol_type = other RNA; note = Description of Artificial Sequence: Synthetic oligonucleotide
taagcgacgccacaatccttt

SEQ ID NO: 32127 - RNA, 21 nt, synthetic construct
  source 1..21: mol_type = other RNA; note = Description of Artificial Sequence: Synthetic oligonucleotide
tgaagcgacgccacaatcctt

SEQ ID NO: 32128 - RNA, 21 nt, synthetic construct
  source 1..21: mol_type = other RNA; note = Description of Artificial Sequence: Synthetic oligonucleotide
ttgaagcgacgccacaatctt

SEQ ID NO: 32129 - RNA, 21 nt, synthetic construct
  source 1..21: mol_type = other RNA; note = Description of Artificial Sequence: Synthetic oligonucleotide
tttgaagcgacgccacaattt

SEQ ID NO: 32130 - RNA, 21 nt, synthetic construct
  source 1..21: mol_type = other RNA; note = Description of Artificial Sequence: Synthetic oligonucleotide
tattgaagcgacgccacaatt

SEQ ID NO: 32131 - RNA, 21 nt, synthetic construct
  source 1..21: mol_type = other RNA; note = Description of Artificial Sequence: Synthetic oligonucleotide
tgattgaagcgacgccacatt

SEQ ID NO: 32132 - RNA, 21 nt, synthetic construct
  source 1..21: mol_type = other RNA; note = Description of Artificial Sequence: Synthetic oligonucleotide
tcgattgaagcgacgccactt

SEQ ID NO: 32133 - RNA, 21 nt, synthetic construct
  source 1..21: mol_type = other RNA; note = Description of Artificial Sequence: Synthetic oligonucleotide
ttcgattgaagcgacgccatt

SEQ ID NO: 32134 - RNA, 21 nt, synthetic construct
  source 1..21: mol_type = other RNA; note = Description of Artificial Sequence: Synthetic oligonucleotide
tgtcgattgaagcgacgcctt

SEQ ID NO: 32135 - RNA, 21 nt, synthetic construct
  source 1..21: mol_type = other RNA; note = Description of Artificial Sequence: Synthetic oligonucleotide
tggtcgattgaagcgacgctt

SEQ ID NO: 32136 - RNA, 21 nt, synthetic construct
  source 1..21: mol_type = other RNA; note = Description of Artificial Sequence: Synthetic oligonucleotide
taggtcgattgaagcgacgtt

SEQ ID NO: 32137 - RNA, 21 nt, synthetic construct
  source 1..21: mol_type = other RNA; note = Description of Artificial Sequence: Synthetic oligonucleotide
taaggtcgattgaagcgactt

SEQ ID NO: 32138 - RNA, 21 nt, synthetic construct
  source 1..21: mol_type = other RNA; note = Description of Artificial Sequence: Synthetic oligonucleotide
taaaggtcgattgaagcgatt

SEQ ID NO: 32139 - RNA, 21 nt, synthetic construct
  source 1..21: mol_type = other RNA; note = Description of Artificial Sequence: Synthetic oligonucleotide
ttaaaggtcgattgaagcgtt

SEQ ID NO: 32140 - RNA, 21 nt, synthetic construct
  source 1..21: mol_type = other RNA; note = Description of Artificial Sequence: Synthetic oligonucleotide
tgtaaaggtcgattgaagctt

SEQ ID NO: 32141 - RNA, 21 nt, synthetic construct
  source 1..21: mol_type = other RNA; note = Description of Artificial Sequence: Synthetic oligonucleotide
tagtaaaggtcgattgaagtt

SEQ ID NO: 32142 - RNA, 21 nt, synthetic construct
  source 1..21: mol_type = other RNA; note = Description of Artificial Sequence: Synthetic oligonucleotide
tcagtaaaggtcgattgaatt

SEQ ID NO: 32143 - RNA, 21 nt, synthetic construct
  source 1..21: mol_type = other RNA; note = Description of Artificial Sequence: Synthetic oligonucleotide
ttcagtaaaggtcgattgatt

SEQ ID NO: 32144 - RNA, 21 nt, synthetic construct
  source 1..21: mol_type = other RNA; note = Description of Artificial Sequence: Synthetic oligonucleotide
tttcagtaaaggtcgattgtt

SEQ ID NO: 32145 - RNA, 21 nt, synthetic construct
  source 1..21: mol_type = other RNA; note = Description of Artificial Sequence: Synthetic oligonucleotide
ttttcagtaaaggtcgatttt

SEQ ID NO: 32146 - RNA, 21 nt, synthetic construct
  source 1..21: mol_type = other RNA; note = Description of Artificial Sequence: Synthetic oligonucleotide
tgtttcagtaaaggtcgattt

SEQ ID NO: 32147 - RNA, 21 nt, synthetic construct
  source 1..21: mol_type = other RNA; note = Description of Artificial Sequence: Synthetic oligonucleotide
ttgtttcagtaaaggtcgatt

SEQ ID NO: 32148 - RNA, 21 nt, synthetic construct
  source 1..21: mol_type = other RNA; note = Description of Artificial Sequence: Synthetic oligonucleotide
tttgtttcagtaaaggtcgtt

SEQ ID NO: 32149 - RNA, 21 nt, synthetic construct
  source 1..21: mol_type = other RNA; note = Description of Artificial Sequence: Synthetic oligonucleotide
tgttgtttcagtaaaggtctt

SEQ ID NO: 32150 - RNA, 21 nt, synthetic construct
  source 1..21: mol_type = other RNA; note = Description of Artificial Sequence: Synthetic oligonucleotide
ttgttgtttcagtaaaggttt

SEQ ID NO: 32151 - RNA, 21 nt, synthetic construct
  source 1..21: mol_type = other RNA; note = Description of Artificial Sequence: Synthetic oligonucleotide
tctgttgtttcagtaaaggtt

SEQ ID NO: 32152 - RNA, 21 nt, synthetic construct
  source 1..21: mol_type = other RNA; note = Description of Artificial Sequence: Synthetic oligonucleotide
tactgttgtttcagtaaagtt

SEQ ID NO: 32153 - RNA, 21 nt, synthetic construct
  source 1..21: mol_type = other RNA; note = Description of Artificial Sequence: Synthetic oligonucleotide
ttactgttgtttcagtaaatt

SEQ ID NO: 32154 - RNA, 21 nt, synthetic construct
  source 1..21: mol_type = other RNA; note = Description of Artificial Sequence: Synthetic oligonucleotide
tttactgttgtttcagtaatt

SEQ ID NO: 32155 - RNA, 21 nt, synthetic construct
  source 1..21: mol_type = other RNA; note = Description of Artificial Sequence: Synthetic oligonucleotide
ttttactgttgtttcagtatt

SEQ ID NO: 32156 - RNA, 21 nt, synthetic construct
  source 1..21: mol_type = other RNA; note = Description of Artificial Sequence: Synthetic oligonucleotide
tgtttactgttgtttcagttt

SEQ ID NO: 32157 - RNA, 21 nt, synthetic construct
  source 1..21: mol_type = other RNA; note = Description of Artificial Sequence: Synthetic oligonucleotide
tggtttactgttgtttcagtt

SEQ ID NO: 32158 - RNA, 21 nt, synthetic construct
  source 1..21: mol_type = other RNA; note = Description of Artificial Sequence: Synthetic oligonucleotide
ttggtttactgttgtttcatt

SEQ ID NO: 32159 - RNA, 21 nt, synthetic construct
  source 1..21: mol_type = other RNA; note = Description of Artificial Sequence: Synthetic oligonucleotide
tatggtttactgttgtttctt

SEQ ID NO: 32160 - RNA, 21 nt, synthetic construct
  source 1..21: mol_type = other RNA; note = Description of Artificial Sequence: Synthetic oligonucleotide
tgatggtttactgttgttttt

SEQ ID NO: 32161 - RNA, 21 nt, synthetic construct
  source 1..21: mol_type = other RNA; note = Description of Artificial Sequence: Synthetic oligonucleotide
tagatggtttactgttgtttt

SEQ ID NO: 32162 - RNA, 21 nt, synthetic construct
  source 1..21: mol_type = other RNA; note = Description of Artificial Sequence: Synthetic oligonucleotide
taagatggtttactgttgttt

SEQ ID NO: 32163 - RNA, 21 nt, synthetic construct
  source 1..21: mol_type = other RNA; note = Description of Artificial Sequence: Synthetic oligonucleotide
taaagatggtttactgttgtt

SEQ ID NO: 32164 - RNA, 21 nt, synthetic construct
  source 1..21: mol_type = other RNA; note = Description of Artificial Sequence: Synthetic oligonucleotide
ttaaagatggtttactgtttt

SEQ ID NO: 32165 - RNA, 21 nt, synthetic construct
  source 1..21: mol_type = other RNA; note = Description of Artificial Sequence: Synthetic oligonucleotide
tataaagatggtttactgttt

SEQ ID NO: 32166 - RNA, 21 nt, synthetic construct
  source 1..21: mol_type = other RNA; note = Description of Artificial Sequence: Synthetic oligonucleotide
taataaagatggtttactgtt

SEQ ID NO: 32167 - RNA, 21 nt, synthetic construct
  source 1..21: mol_type = other RNA; note = Description of Artificial Sequence: Synthetic oligonucleotide
ttaataaagatggtttacttt

SEQ ID NO: 32168 - RNA, 21 nt, synthetic construct
  source 1..21: mol_type = other RNA; note = Description of Artificial Sequence: Synthetic oligonucleotide
tataataaagatggtttactt

SEQ ID NO: 32169 - RNA, 21 nt, synthetic construct
  source 1..21: mol_type = other RNA; note = Description of Artificial Sequence: Synthetic oligonucleotide
tcataataaagatggtttatt

SEQ ID NO: 32170 - RNA, 21 nt, synthetic construct
  source 1..21: mol_type = other RNA; note = Description of Artificial Sequence: Synthetic oligonucleotide
tccataataaagatggttttt

SEQ ID NO: 32171 - RNA, 21 nt, synthetic construct
  source 1..21: mol_type = other RNA; note = Description of Artificial Sequence: Synthetic oligonucleotide
taccataataaagatggtttt

SEQ ID NO: 32172 - RNA, 21 nt, synthetic construct
  source 1..21: mol_type = other RNA; note = Description of Artificial Sequence: Synthetic oligonucleotide
tgaccataataaagatggttt

SEQ ID NO: 32173 - RNA, 21 nt, synthetic construct
  source 1..21: mol_type = other RNA; note = Description of Artificial Sequence: Synthetic oligonucleotide
ttgaccataataaagatggtt

SEQ ID NO: 32174 - RNA, 21 nt, synthetic construct
  source 1..21: mol_type = other RNA; note = Description of Artificial Sequence: Synthetic oligonucleotide
tatgaccataataaagatgtt

SEQ ID NO: 32175 - RNA, 21 nt, synthetic construct
  source 1..21: mol_type = other RNA; note = Description of Artificial Sequence: Synthetic oligonucleotide
ttatgaccataataaagattt

SEQ ID NO: 32176 - RNA, 21 nt, synthetic construct
  source 1..21: mol_type = other RNA; note = Description of Artificial Sequence: Synthetic oligonucleotide
tatatgaccataataaagatt

SEQ ID NO: 32177 - RNA, 21 nt, synthetic construct
  source 1..21: mol_type = other RNA; note = Description of Artificial Sequence: Synthetic oligonucleotide
taatatgaccataataaagtt

SEQ ID NO: 32178 - RNA, 21 nt, synthetic construct
  source 1..21: mol_type = other RNA; note = Description of Artificial Sequence: Synthetic oligonucleotide
taaatatgaccataataaatt

SEQ ID NO: 32179 - RNA, 21 nt, synthetic construct
  source 1..21: mol_type = other RNA; note = Description of Artificial Sequence: Synthetic oligonucleotide
tgaaatatgaccataataatt

SEQ ID NO: 32180 - RNA, 21 nt, synthetic construct
  source 1..21: mol_type = other RNA; note = Description of Artificial Sequence: Synthetic oligonucleotide
ttgaaatatgaccataatatt

SEQ ID NO: 32181 - RNA, 21 nt, synthetic construct
  source 1..21: mol_type = other RNA; note = Description of Artificial Sequence: Synthetic oligonucleotide
tgtgaaatatgaccataattt

SEQ ID NO: 32182 - RNA, 21 nt, synthetic construct
  source 1..21: mol_type = other RNA; note = Description of Artificial Sequence: Synthetic oligonucleotide
ttgtgaaatatgaccataatt

SEQ ID NO: 32183 - RNA, 21 nt, synthetic construct
  source 1..21: mol_type = other RNA; note = Description of Artificial Sequence: Synthetic oligonucleotide
tctgtgaaatatgaccatatt

SEQ ID NO: 32184 - RNA, 21 nt, synthetic construct
  source 1..21: mol_type = other RNA; note = Description of Artificial Sequence: Synthetic oligonucleotide
tgctgtgaaatatgaccattt

SEQ ID NO: 32185 - RNA, 21 nt, synthetic construct
  source 1..21: mol_type = other RNA; note = Description of Artificial Sequence: Synthetic oligonucleotide
ttgctgtgaaatatgaccatt

SEQ ID NO: 32186 - RNA, 21 nt, synthetic construct
  source 1..21: mol_type = other RNA; note = Description of Artificial Sequence: Synthetic oligonucleotide
tgtgctgtgaaatatgacctt

SEQ ID NO: 32187 - RNA, 21 nt, synthetic construct
  source 1..21: mol_type = other RNA; note = Description of Artificial Sequence: Synthetic oligonucleotide
tggtgctgtgaaatatgactt

SEQ ID NO: 32188 - RNA, 21 nt, synthetic construct
  source 1..21: mol_type = other RNA; note = Description of Artificial Sequence: Synthetic oligonucleotide
ttggtgctgtgaaatatgatt

SEQ ID NO: 32189 - RNA, 21 nt, synthetic construct
  source 1..21: mol_type = other RNA; note = Description of Artificial Sequence: Synthetic oligonucleotide
tttggtgctgtgaaatatgtt

SEQ ID NO: 32190 - RNA, 21 nt, synthetic construct
  source 1..21: mol_type = other RNA; note = Description of Artificial Sequence: Synthetic oligonucleotide
ttttggtgctgtgaaatattt

SEQ ID NO: 32191 - RNA, 21 nt, synthetic construct
  source 1..21: mol_type = other RNA; note = Description of Artificial Sequence: Synthetic oligonucleotide
tttttggtgctgtgaaatatt

SEQ ID NO: 32192 - RNA, 21 nt, synthetic construct
  source 1..21: mol_type = other RNA; note = Description of Artificial Sequence: Synthetic oligonucleotide
tattttggtgctgtgaaattt

SEQ ID NO: 32193 - RNA, 21 nt, synthetic construct
  source 1..21: mol_type = other RNA; note = Description of Artificial Sequence: Synthetic oligonucleotide
ttattttggtgctgtgaaatt

SEQ ID NO: 32194 - RNA, 21 nt, synthetic construct
  source 1..21: mol_type = other RNA; note = Description of Artificial Sequence: Synthetic oligonucleotide
tttattttggtgctgtgaatt

SEQ ID NO: 32195 - RNA, 21 nt, synthetic construct
  source 1..21: mol_type = other RNA; note = Description of Artificial Sequence: Synthetic oligonucleotide
ttttattttggtgctgtgatt

SEQ ID NO: 32196 - RNA, 21 nt, synthetic construct
  source 1..21: mol_type = other RNA; note = Description of Artificial Sequence: Synthetic oligonucleotide
tatttattttggtgctgtgtt

SEQ ID NO: 32197 - RNA, 21 nt, synthetic construct
  source 1..21: mol_type = other RNA; note = Description of Artificial Sequence: Synthetic oligonucleotide
tgatttattttggtgctgttt

SEQ ID NO: 32198 - RNA, 21 nt, synthetic construct
  source 1..21: mol_type = other RNA; note = Description of Artificial Sequence: Synthetic oligonucleotide
ttgatttattttggtgctgtt

SEQ ID NO: 32199 - RNA, 21 nt, synthetic construct
  source 1..21: mol_type = other RNA; note = Description of Artificial Sequence: Synthetic oligonucleotide
tatgatttattttggtgcttt

SEQ ID NO: 32200 - RNA, 21 nt, synthetic construct
  source 1..21: mol_type = other RNA; note = Description of Artificial Sequence: Synthetic oligonucleotide
tgatgatttattttggtgctt

SEQ ID NO: 32201 - RNA, 21 nt, synthetic construct
  source 1..21: mol_type = other RNA; note = Description of Artificial Sequence: Synthetic oligonucleotide
tagatgatttattttggtgtt

SEQ ID NO: 32202 - RNA, 21 nt, synthetic construct
  source 1..21: mol_type = other RNA; note = Description of Artificial Sequence: Synthetic oligonucleotide
taagatgatttattttggttt

SEQ ID NO: 32203 - RNA, 21 nt, synthetic construct
  source 1..21: mol_type = other RNA; note = Description of Artificial Sequence: Synthetic oligonucleotide
taaagatgatttattttggtt

SEQ ID NO: 32204 - RNA, 21 nt, synthetic construct
  source 1..21: mol_type = other RNA; note = Description of Artificial Sequence: Synthetic oligonucleotide
ttaaagatgatttattttgtt

SEQ ID NO: 32205 - RNA, 21 nt, synthetic construct
  source 1..21: mol_type = other RNA; note = Description of Artificial Sequence: Synthetic oligonucleotide
tataaagatgatttatttttt

SEQ ID NO: 32206 - RNA, 21 nt, synthetic construct
  source 1..21: mol_type = other RNA; note = Description of Artificial Sequence: Synthetic oligonucleotide
taataaagatgatttattttt

SEQ ID NO: 32207 - RNA, 21 nt, synthetic construct
  source 1..21: mol_type = other RNA; note = Description of Artificial Sequence: Synthetic oligonucleotide
ttaataaagatgatttatttt

SEQ ID NO: 32208 - RNA, 21 nt, synthetic construct
  source 1..21: mol_type = other RNA; note = Description of Artificial Sequence: Synthetic oligonucleotide
tttaataaagatgatttattt

SEQ ID NO: 32209 - RNA, 21 nt, synthetic construct
  source 1..21: mol_type = other RNA; note = Description of Artificial Sequence: Synthetic oligonucleotide
tcttaataaagatgatttatt

SEQ ID NO: 32210 - RNA, 21 nt, synthetic construct
  source 1..21: mol_type = other RNA; note = Description of Artificial Sequence: Synthetic oligonucleotide
tacttaataaagatgattttt

SEQ ID NO: 32211 - RNA, 21 nt, synthetic construct
  source 1..21: mol_type = other RNA; note = Description of Artificial Sequence: Synthetic oligonucleotide
ttacttaataaagatgatttt

SEQ ID NO: 32212 - RNA, 21 nt, synthetic construct
  source 1..21: mol_type = other RNA; note = Description of Artificial Sequence: Synthetic oligonucleotide
tctacttaataaagatgattt

SEQ ID NO: 32213 - RNA, 21 nt, synthetic construct
  source 1..21: mol_type = other RNA; note = Description of Artificial Sequence: Synthetic oligonucleotide
ttctacttaataaagatgatt

SEQ ID NO: 32214 - RNA, 21 nt, synthetic construct
  source 1..21: mol_type = other RNA; note = Description of Artificial Sequence: Synthetic oligonucleotide
tatctacttaataaagatgtt

SEQ ID NO: 32215 - RNA, 21 nt, synthetic construct
  source 1..21: mol_type = other RNA; note = Description of Artificial Sequence: Synthetic oligonucleotide
tcatctacttaataaagattt

SEQ ID NO: 32216 - RNA, 21 nt, synthetic construct
  source 1..21: mol_type = other RNA; note = Description of Artificial Sequence: Synthetic oligonucleotide
ttcatctacttaataaagatt

SEQ ID NO: 32217 - RNA, 21 nt, synthetic construct
  source 1..21: mol_type = other RNA; note = Description of Artificial Sequence: Synthetic oligonucleotide
tttcatctacttaataaagtt

SEQ ID NO: 32218 - RNA, 21 nt, synthetic construct
  source 1..21: mol_type = other RNA; note = Description of Artificial Sequence: Synthetic oligonucleotide
ttttcatctacttaataaatt

SEQ ID NO: 32219 - RNA, 21 nt, synthetic construct
  source 1..21: mol_type = other RNA; note = Description of Artificial Sequence: Synthetic oligonucleotide
tgtttcatctacttaataatt

SEQ ID NO: 32220 - RNA, 21 nt, synthetic construct
  source 1..21: mol_type = other RNA; note = Description of Artificial Sequence: Synthetic oligonucleotide
ttgtttcatctacttaatatt

SEQ ID NO: 32221 - RNA, 21 nt, synthetic construct
  source 1..21: mol_type = other RNA; note = Description of Artificial Sequence: Synthetic oligonucleotide
tatgtttcatctacttaattt

SEQ ID NO: 32222 - RNA, 21 nt, synthetic construct
  source 1..21: mol_type = other RNA; note = Description of Artificial Sequence: Synthetic oligonucleotide
taatgtttcatctacttaatt

SEQ ID NO: 32223 - RNA, 21 nt, synthetic construct
  source 1..21: mol_type = other RNA; note = Description of Artificial Sequence: Synthetic oligonucleotide
ttaatgtttcatctacttatt

SEQ ID NO: 32224 - RNA, 21 nt, synthetic construct
  source 1..21: mol_type = other RNA; note = Description of Artificial Sequence: Synthetic oligonucleotide
tttaatgtttcatctactttt

SEQ ID NO: 32225 - RNA, 21 nt, synthetic construct
  source 1..21: mol_type = other RNA; note = Description of Artificial Sequence: Synthetic oligonucleotide
tgttaatgtttcatctacttt

SEQ ID NO: 32226 - RNA, 21 nt, synthetic construct
  source 1..21: mol_type = other RNA; note = Description of Artificial Sequence: Synthetic oligonucleotide
tagttaatgtttcatctactt

SEQ ID NO: 32227 - RNA, 21 nt, synthetic construct
  source 1..21: mol_type = other RNA; note = Description of Artificial Sequence: Synthetic oligonucleotide
tgagttaatgtttcatctatt

SEQ ID NO: 32228 - RNA, 21 nt, synthetic construct
  source 1..21: mol_type = other RNA; note = Description of Artificial Sequence: Synthetic oligonucleotide
tagagttaatgtttcatcttt

SEQ ID NO: 32229 - RNA, 21 nt, synthetic construct
  source 1..21: mol_type = other RNA; note = Description of Artificial Sequence: Synthetic oligonucleotide
ttagagttaatgtttcatctt

SEQ ID NO: 32230 - RNA, 21 nt, synthetic construct
  source 1..21: mol_type = other RNA; note = Description of Artificial Sequence: Synthetic oligonucleotide
tttagagttaatgtttcattt

SEQ ID NO: 32231 - RNA, 21 nt, synthetic construct
  source 1..21: mol_type = other RNA; note = Description of Artificial Sequence: Synthetic oligonucleotide
tgttagagttaatgtttcatt

SEQ ID NO: 32232 - RNA, 21 nt, synthetic construct
  source 1..21: mol_type = other RNA; note = Description of Artificial Sequence: Synthetic oligonucleotide
tagttagagttaatgtttctt

SEQ ID NO: 32233 - RNA, 21 nt, synthetic construct
  source 1..21: mol_type = other RNA; note = Description of Artificial Sequence: Synthetic oligonucleotide
tcagttagagttaatgttttt

SEQ ID NO: 32234 - RNA, 21 nt, synthetic construct
  source 1..21: mol_type = other RNA; note = Description of Artificial Sequence: Synthetic oligonucleotide
tacagttagagttaatgtttt

SEQ ID NO: 32235 - RNA, 21 nt, synthetic construct
  source 1..21: mol_type = other RNA; note = Description of Artificial Sequence: Synthetic oligonucleotide
tcacagttagagttaatgttt

SEQ ID NO: 32236 - RNA, 21 nt, synthetic construct
  source 1..21: mol_type = other RNA; note = Description of Artificial Sequence: Synthetic oligonucleotide
ttcacagttagagttaatgtt

SEQ ID NO: 32237 - RNA, 21 nt, synthetic construct
  source 1..21: mol_type = other RNA; note = Description of Artificial Sequence: Synthetic oligonucleotide
tgtcacagttagagttaattt

SEQ ID NO: 32238 - RNA, 21 nt, synthetic construct
  source 1..21: mol_type = other RNA; note = Description of Artificial Sequence: Synthetic oligonucleotide
ttgtcacagttagagttaatt

SEQ ID NO: 32239 - RNA, 21 nt, synthetic construct
  source 1..21: mol_type = other RNA; note = Description of Artificial Sequence: Synthetic oligonucleotide
tttgtcacagttagagttatt

SEQ ID NO: 32240 - RNA, 21 nt, synthetic construct
  source 1..21: mol_type = other RNA; note = Description of Artificial Sequence: Synthetic oligonucleotide
ttttgtcacagttagagtttt

SEQ ID NO: 32241 - RNA, 21 nt, synthetic construct
  source 1..21: mol_type = other RNA; note = Description of Artificial Sequence: Synthetic oligonucleotide
tctttgtcacagttagagttt

SEQ ID NO: 32242 - RNA, 21 nt, synthetic construct
  source 1..21: mol_type = other RNA; note = Description of Artificial Sequence: Synthetic oligonucleotide
ttctttgtcacagttagagtt

SEQ ID NO: 32243 - RNA, 21 nt, synthetic construct
  source 1..21: mol_type = other RNA; note = Description of Artificial Sequence: Synthetic oligonucleotide
tttctttgtcacagttagatt

SEQ ID NO: 32244 - RNA, 21 nt, synthetic construct
  source 1..21: mol_type = other RNA; note = Description of Artificial Sequence: Synthetic oligonucleotide
tcttctttgtcacagttagtt

SEQ ID NO: 32245 - RNA, 21 nt, synthetic construct
  source 1..21: mol_type = other RNA; note = Description of Artificial Sequence: Synthetic oligonucleotide
ttcttctttgtcacagttatt

SEQ ID NO: 32246 - RNA, 21 nt, synthetic construct
  source 1..21: mol_type = other RNA; note = Description of Artificial Sequence: Synthetic oligonucleotide
tgtcttctttgtcacagtttt

SEQ ID NO: 32247 - RNA, 21 nt, synthetic construct
  source 1..21: mol_type = other RNA; note = Description of Artificial Sequence: Synthetic oligonucleotide
tggtcttctttgtcacagttt

SEQ ID NO: 32248 - RNA, 21 nt, synthetic construct
  source 1..21: mol_type = other RNA; note = Description of Artificial Sequence: Synthetic oligonucleotide
ttggtcttctttgtcacagtt

SEQ ID NO: 32249 - RNA, 21 nt, synthetic construct
  source 1..21: mol_type = other RNA; note = Description of Artificial Sequence: Synthetic oligonucleotide
tgtggtcttctttgtcacatt

SEQ ID NO: 32250 - RNA, 21 nt, synthetic construct
  source 1..21: mol_type = other RNA; note = Description of Artificial Sequence: Synthetic oligonucleotide
ttgtggtcttctttgtcactt

SEQ ID NO: 32251 - RNA, 21 nt, synthetic construct
  source 1..21: mol_type = other RNA; note = Description of Artificial Sequence: Synthetic oligonucleotide
tttgtggtcttctttgtcatt

SEQ ID NO: 32252 - RNA, 21 nt, synthetic construct
  source 1..21: mol_type = other RNA; note = Description of Artificial Sequence: Synthetic oligonucleotide
ttttgtggtcttctttgtctt

SEQ ID NO: 32253 - RNA, 21 nt, synthetic construct
  source 1..21: mol_type = other RNA; note = Description of Artificial Sequence: Synthetic oligonucleotide
tatttgtggtcttctttgttt

SEQ ID NO: 32254 - RNA, 21 nt, synthetic construct
  source 1..21: mol_type = other RNA; note = Description of Artificial Sequence: Synthetic oligonucleotide
ttatttgtggtcttctttgtt

SEQ ID NO: 32255 - RNA, 21 nt, synthetic construct
  source 1..21: mol_type = other RNA; note = Description of Artificial Sequence: Synthetic oligonucleotide
tctatttgtggtcttcttttt

SEQ ID NO: 32256 - RNA, 21 nt, synthetic construct
  source 1..21: mol_type = other RNA; note = Description of Artificial Sequence: Synthetic oligonucleotide
tactatttgtggtcttctttt

SEQ ID NO: 32257 - RNA, 21 nt, synthetic construct
  source 1..21: mol_type = other RNA; note = Description of Artificial Sequence: Synthetic oligonucleotide
taactatttgtggtcttcttt

SEQ ID NO: 32258 - RNA, 21 nt, synthetic construct
  source 1..21: mol_type = other RNA; note = Description of Artificial Sequence: Synthetic oligonucleotide
ttaactatttgtggtcttctt

SEQ ID NO: 32259 - RNA, 21 nt, synthetic construct
  source 1..21: mol_type = other RNA; note = Description of Artificial Sequence: Synthetic oligonucleotide
tataactatttgtggtctttt

SEQ ID NO: 32260 - RNA, 21 nt, synthetic construct
  source 1..21: mol_type = other RNA; note = Description of Artificial Sequence: Synthetic oligonucleotide
tgataactatttgtggtcttt

SEQ ID NO: 32261 - RNA, 21 nt, synthetic construct
  source 1..21: mol_type = other RNA; note = Description of Artificial Sequence: Synthetic oligonucleotide
tagataactatttgtggtctt

SEQ ID NO: 32262 - RNA, 21 nt, synthetic construct
  source 1..21: mol_type = other RNA; note = Description of Artificial Sequence: Synthetic oligonucleotide
taagataactatttgtggttt

SEQ ID NO: 32263 - RNA, 21 nt, synthetic construct
  source 1..21: mol_type = other RNA; note = Description of Artificial Sequence: Synthetic oligonucleotide
taaagataactatttgtggtt

SEQ ID NO: 32264 - RNA, 21 nt, synthetic construct
  source 1..21: mol_type = other RNA; note = Description of Artificial Sequence: Synthetic oligonucleotide
taaaagataactatttgtgtt

SEQ ID NO: 32265 - RNA, 21 nt, synthetic construct
  source 1..21: mol_type = other RNA; note = Description of Artificial Sequence: Synthetic oligonucleotide
ttaaaagataactatttgttt

SEQ ID NO: 32266 - RNA, 21 nt, synthetic construct
  source 1..21: mol_type = other RNA; note = Description of Artificial Sequence: Synthetic oligonucleotide
tttaaaagataactatttgtt

SEQ ID NO: 32267 - RNA, 21 nt, synthetic construct
  source 1..21: mol_type = other RNA; note = Description of Artificial Sequence: Synthetic oligonucleotide
tattaaaagataactattttt

SEQ ID NO: 32268 - RNA, 21 nt, synthetic construct
  source 1..21: mol_type = other RNA; note = Description of Artificial Sequence: Synthetic oligonucleotide
taattaaaagataactatttt

SEQ ID NO: 32269 - RNA, 21 nt, synthetic construct
  source 1..21: mol_type = other RNA; note = Description of Artificial Sequence: Synthetic oligonucleotide
ttaattaaaagataactattt

SEQ ID NO: 32270 - RNA, 21 nt, synthetic construct
  source 1..21: mol_type = other RNA; note = Description of Artificial Sequence: Synthetic oligonucleotide
tgtaattaaaagataactatt

SEQ ID NO: 32271 - RNA, 21 nt, synthetic construct
  source 1..21: mol_type = other RNA; note = Description of Artificial Sequence: Synthetic oligonucleotide
ttgtaattaaaagataacttt

SEQ ID NO: 32272 - RNA, 21 nt, synthetic construct
  source 1..21: mol_type = other RNA; note = Description of Artificial Sequence: Synthetic oligonucleotide
tctgtaattaaaagataactt

SEQ ID NO: 32273 - RNA, 21 nt, synthetic construct
  source 1..21: mol_type = other RNA; note = Description of Artificial Sequence: Synthetic oligonucleotide
ttctgtaattaaaagataatt

SEQ ID NO: 32274 - RNA, 21 nt, synthetic construct
  source 1..21: mol_type = other RNA; note = Description of Artificial Sequence: Synthetic oligonucleotide
tttctgtaattaaaagatatt

SEQ ID NO: 32275 - RNA, 21 nt, synthetic construct
  source 1..21: mol_type = other RNA; note = Description of Artificial Sequence: Synthetic oligonucleotide
tcttctgtaattaaaagattt

SEQ ID NO: 32276 - RNA, 21 nt, synthetic construct
  source 1..21: mol_type = other RNA; note = Description of Artificial Sequence: Synthetic oligonucleotide
ttcttctgtaattaaaagatt

SEQ ID NO: 32277 - RNA, 21 nt, synthetic construct
  source 1..21: mol_type = other RNA; note = Description of Artificial Sequence: Synthetic oligonucleotide
tctcttctgtaattaaaagtt

SEQ ID NO: 32278 - RNA, 21 nt, synthetic construct
  source 1..21: mol_type = other RNA; note = Description of Artificial Sequence: Synthetic oligonucleotide
tactcttctgtaattaaaatt

SEQ ID NO: 32279 - RNA, 21 nt, synthetic construct
  source 1..21: mol_type = other RNA; note = Description of Artificial Sequence: Synthetic oligonucleotide
taactcttctgtaattaaatt

SEQ ID NO: 32280 - RNA, 21 nt, synthetic construct
  source 1..21: mol_type = other RNA; note = Description of Artificial Sequence: Synthetic oligonucleotide
taaactcttctgtaattaatt

SEQ ID NO: 32281 - RNA, 21 nt, synthetic construct
  source 1..21: mol_type = other RNA; note = Description of Artificial Sequence: Synthetic oligonucleotide
tgaaactcttctgtaattatt

SEQ ID NO: 32282 - RNA, 21 nt, synthetic construct
  source 1..21: mol_type = other RNA; note = Description of Artificial Sequence: Synthetic oligonucleotide
tagaaactcttctgtaatttt

SEQ ID NO: 32283 - RNA, 21 nt, synthetic construct
  source 1..21: mol_type = other RNA; note = Description of Artificial Sequence: Synthetic oligonucleotide
taagaaactcttctgtaattt

SEQ ID NO: 32284 - RNA, 21 nt, synthetic construct
  source 1..21: mol_type = other RNA; note = Description of Artificial Sequence: Synthetic oligonucleotide
ttaagaaactcttctgtaatt

SEQ ID NO: 32285 - RNA, 21 nt, synthetic construct
  source 1..21: mol_type = other RNA; note = Description of Artificial Sequence: Synthetic oligonucleotide
tttaagaaactcttctgtatt

SEQ ID NO: 32286 - RNA, 21 nt, synthetic construct
  source 1..21: mol_type = other RNA; note = Description of Artificial Sequence: Synthetic oligonucleotide
tgttaagaaactcttctgttt

SEQ ID NO: 32287 - RNA, 21 nt, synthetic construct
  source 1..21: mol_type = other RNA; note = Description of Artificial Sequence: Synthetic oligonucleotide
tagttaagaaactcttctgtt

SEQ ID NO: 32288 - RNA, 21 nt, synthetic construct
  source 1..21: mol_type = other RNA; note = Description of Artificial Sequence: Synthetic oligonucleotide
taagttaagaaactcttcttt

SEQ ID NO: 32289 - RNA, 21 nt, synthetic construct
  source 1..21: mol_type = other RNA; note = Description of Artificial Sequence: Synthetic oligonucleotide
ttaagttaagaaactcttctt

SEQ ID NO: 32290 - RNA, 21 nt, synthetic construct
  source 1..21: mol_type = other RNA; note = Description of Artificial Sequence: Synthetic oligonucleotide
tgtaagttaagaaactctttt

SEQ ID NO: 32291 - RNA, 21 nt, synthetic construct
  source 1..21: mol_type = other RNA; note = Description of Artificial Sequence: Synthetic oligonucleotide
tagtaagttaagaaactcttt

SEQ ID NO: 32292 - RNA, 21 nt, synthetic construct
  source 1..21: mol_type = other RNA; note = Description of Artificial Sequence: Synthetic oligonucleotide
taagtaagttaagaaactctt

SEQ ID NO: 32293 - RNA, 21 nt, synthetic construct
  source 1..21: mol_type = other RNA; note = Description of Artificial Sequence: Synthetic oligonucleotide
taaagtaagttaagaaacttt

SEQ ID NO: 32294 - RNA, 21 nt, synthetic construct
  source 1..21: mol_type = other RNA; note = Description of Artificial Sequence: Synthetic oligonucleotide
taaaagtaagttaagaaactt

SEQ ID NO: 32295 - RNA, 21 nt, synthetic construct
  source 1..21: mol_type = other RNA; note = Description of Artificial Sequence: Synthetic oligonucleotide
tcaaaagtaagttaagaaatt

SEQ ID NO: 32296 - RNA, 21 nt, synthetic construct
  source 1..21: mol_type = other RNA; note = Description of Artificial Sequence: Synthetic oligonucleotide
tacaaaagtaagttaagaatt

SEQ ID NO: 32297 - RNA, 21 nt, synthetic construct
  source 1..21: mol_type = other RNA; note = Description of Artificial Sequence: Synthetic oligonucleotide
ttacaaaagtaagttaagatt

SEQ ID NO: 32298 - RNA, 21 nt, synthetic construct
  source 1..21: mol_type = other RNA; note = Description of Artificial Sequence: Synthetic oligonucleotide
tttacaaaagtaagttaagtt

SEQ ID NO: 32299 - RNA, 21 nt, synthetic construct
  source 1..21: mol_type = other RNA; note = Description of Artificial Sequence: Synthetic oligonucleotide
tcttacaaaagtaagttaatt

SEQ ID NO: 32300 - RNA, 21 nt, synthetic construct
  source 1..21: mol_type = other RNA; note = Description of Artificial Sequence: Synthetic oligonucleotide
tacttacaaaagtaagttatt

SEQ ID NO: 32301 - RNA, 21 nt, synthetic construct
  source 1..21: mol_type = other RNA; note = Description of Artificial Sequence: Synthetic oligonucleotide
taacttacaaaagtaagtttt

SEQ ID NO: 32302 - RNA, 21 nt, synthetic construct
  source 1..21: mol_type = other RNA; note = Description of Artificial Sequence: Synthetic oligonucleotide
taaacttacaaaagtaagttt

SEQ ID NO: 32303 - RNA, 21 nt, synthetic construct
  source 1..21: mol_type = other RNA; note = Description of Artificial Sequence: Synthetic oligonucleotide
taaaacttacaaaagtaagtt

SEQ ID NO: 32304 - RNA, 21 nt, synthetic construct
  source 1..21: mol_type = other RNA; note = Description of Artificial Sequence: Synthetic oligonucleotide
taaaaacttacaaaagtaatt

SEQ ID NO: 32305 - RNA, 21 nt, synthetic construct
  source 1..21: mol_type = other RNA; note = Description of Artificial Sequence: Synthetic oligonucleotide
ttaaaaacttacaaaagtatt

SEQ ID NO: 32306 - RNA, 21 nt, synthetic construct
  source 1..21: mol_type = other RNA; note = Description of Artificial Sequence: Synthetic oligonucleotide
tataaaaacttacaaaagttt

SEQ ID NO: 32307 - RNA, 21 nt, synthetic construct
  source 1..21: mol_type = other RNA; note = Description of Artificial Sequence: Synthetic oligonucleotide
taataaaaacttacaaaagtt

SEQ ID NO: 32308 - RNA, 21 nt, synthetic construct
  source 1..21: mol_type = other RNA; note = Description of Artificial Sequence: Synthetic oligonucleotide
tcaataaaaacttacaaaatt

SEQ ID NO: 32309 - RNA, 21 nt, synthetic construct
  source 1..21: mol_type = other RNA; note = Description of Artificial Sequence: Synthetic oligonucleotide
tacaataaaaacttacaaatt

SEQ ID NO: 32310 - RNA, 21 nt, synthetic construct
  source 1..21: mol_type = other RNA; note = Description of Artificial Sequence: Synthetic oligonucleotide
tcacaataaaaacttacaatt

SEQ ID NO: 32311 - RNA, 21 nt, synthetic construct
  source 1..21: mol_type = other RNA; note = Description of Artificial Sequence: Synthetic oligonucleotide
tacacaataaaaacttacatt

SEQ ID NO: 32312 - RNA, 21 nt, synthetic construct
  source 1..21: mol_type = other RNA; note = Description of Artificial Sequence: Synthetic oligonucleotide
ttacacaataaaaacttactt

SEQ ID NO: 32313 - RNA, 21 nt, synthetic construct
  source 1..21: mol_type = other RNA; note = Description of Artificial Sequence: Synthetic oligonucleotide
tttacacaataaaaacttatt

SEQ ID NO: 32314 - RNA, 21 nt, synthetic construct
  source 1..21: mol_type = other RNA; note = Description of Artificial Sequence: Synthetic oligonucleotide
tcttacacaataaaaactttt

SEQ ID NO: 32315 - RNA, 21 nt, synthetic construct
  source 1..21: mol_type = other RNA; note = Description of Artificial Sequence: Synthetic oligonucleotide
tacttacacaataaaaacttt

SEQ ID NO: 32316 - RNA, 21 nt, synthetic construct
  source 1..21: mol_type = other RNA; note = Description of Artificial Sequence: Synthetic oligonucleotide
taacttacacaataaaaactt

SEQ ID NO: 32317 - RNA, 21 nt, synthetic construct
  source 1..21: mol_type = other RNA; note = Description of Artificial Sequence: Synthetic oligonucleotide
taaacttacacaataaaaatt

SEQ ID NO: 32318 - RNA, 21 nt, synthetic construct
  source 1..21: mol_type = other RNA; note = Description of Artificial Sequence: Synthetic oligonucleotide
ttaaacttacacaataaaatt

SEQ ID NO: 32319 - RNA, 21 nt, synthetic construct
  source 1..21: mol_type = other RNA; note = Description of Artificial Sequence: Synthetic oligonucleotide
tataaacttacacaataaatt

SEQ ID NO: 32320 - RNA, 21 nt, synthetic construct
  source 1..21: mol_type = other RNA; note = Description of Artificial Sequence: Synthetic oligonucleotide
ttataaacttacacaataatt

SEQ ID NO: 32321 - RNA, 21 nt, synthetic construct
  source 1..21: mol_type = other RNA; note = Description of Artificial Sequence: Synthetic oligonucleotide
tttataaacttacacaatatt

SEQ ID NO: 32322 - RNA, 21 nt, synthetic construct
  source 1..21: mol_type = other RNA; note = Description of Artificial Sequence: Synthetic oligonucleotide
tattataaacttacacaattt

SEQ ID NO: 32323 - RNA, 21 nt, synthetic construct
  source 1..21: mol_type = other RNA; note = Description of Artificial Sequence: Synthetic oligonucleotide
tcattataaacttacacaatt

SEQ ID NO: 32324 - RNA, 21 nt, synthetic construct
  source 1..21: mol_type = other RNA; note = Description of Artificial Sequence: Synthetic oligonucleotide
tgcattataaacttacacatt

SEQ ID NO: 32325 - RNA, 21 nt, synthetic construct
  source 1..21: mol_type = other RNA; note = Description of Artificial Sequence: Synthetic oligonucleotide
ttgcattataaacttacactt

SEQ ID NO: 32326 - RNA, 21 nt, synthetic construct
  source 1..21: mol_type = other RNA; note = Description of Artificial Sequence: Synthetic oligonucleotide
tctgcattataaacttacatt

SEQ ID NO: 32327 - RNA, 21 nt, synthetic construct
  source 1..21: mol_type = other RNA; note = Description of Artificial Sequence: Synthetic oligonucleotide
tcctgcattataaacttactt

SEQ ID NO: 32328 - RNA, 21 nt, synthetic construct
  source 1..21: mol_type = other RNA; note = Description of Artificial Sequence: Synthetic oligonucleotide
tccctgcattataaacttatt

SEQ ID NO: 32329 - RNA, 21 nt, synthetic construct
  source 1..21: mol_type = other RNA; note = Description of Artificial Sequence: Synthetic oligonucleotide
tcccctgcattataaactttt

SEQ ID NO: 32330 - RNA, 21 nt, synthetic construct
  source 1..21: mol_type = other RNA; note = Description of Artificial Sequence: Synthetic oligonucleotide
ttcccctgcattataaacttt

SEQ ID NO: 32331 - RNA, 21 nt, synthetic construct
  source 1..21: mol_type = other RNA; note = Description of Artificial Sequence: Synthetic oligonucleotide
tttcccctgcattataaactt

SEQ ID NO: 32332 - RNA, 21 nt, synthetic construct
  source 1..21: mol_type = other RNA; note = Description of Artificial Sequence: Synthetic oligonucleotide
tcttcccctgcattataaatt

SEQ ID NO: 32333 - RNA, 21 nt, synthetic construct
  source 1..21: mol_type = other RNA; note = Description of Artificial Sequence: Synthetic oligonucleotide
tacttcccctgcattataatt

SEQ ID NO: 32334 - RNA, 21 nt, synthetic construct
  source 1..21: mol_type = other RNA; note = Description of Artificial Sequence: Synthetic oligonucleotide
ttacttcccctgcattatatt

SEQ ID NO: 32335 - RNA, 21 nt, synthetic construct
  source 1..21: mol_type = other RNA; note = Description of Artificial Sequence: Synthetic oligonucleotide
tgtacttcccctgcattattt

SEQ ID NO: 32336 - RNA, 21 nt, synthetic construct
  source 1..21: mol_type = other RNA; note = Description of Artificial Sequence: Synthetic oligonucleotide
tagtacttcccctgcattatt

SEQ ID NO: 32337 - RNA, 21 nt, synthetic construct
  source 1..21: mol_type = other RNA; note = Description of Artificial Sequence: Synthetic oligonucleotide
ttagtacttcccctgcatttt

SEQ ID NO: 32338 - RNA, 21 nt, synthetic construct
  source 1..21: mol_type = other RNA; note = Description of Artificial Sequence: Synthetic oligonucleotide
tgtagtacttcccctgcattt

SEQ ID NO: 32339 - RNA, 21 nt, synthetic construct
  source 1..21: mol_type = other RNA; note = Description of Artificial Sequence: Synthetic oligonucleotide
tagtagtacttcccctgcatt

SEQ ID NO: 32340 - RNA, 21 nt, synthetic construct
  source 1..21: mol_type = other RNA; note = Description of Artificial Sequence: Synthetic oligonucleotide
tgagtagtacttcccctgctt

SEQ ID NO: 32341 - RNA, 21 nt, synthetic construct
  source 1..21: mol_type = other RNA; note = Description of Artificial Sequence: Synthetic oligonucleotide
tggagtagtacttcccctgtt

SEQ ID NO: 32342 - RNA, 21 nt, synthetic construct
  source 1..21: mol_type = other RNA; note = Description of Artificial Sequence: Synthetic oligonucleotide
taggagtagtacttccccttt

SEQ ID NO: 32343 - RNA, 21 nt, synthetic construct
  source 1..21: mol_type = other RNA; note = Description of Artificial Sequence: Synthetic oligonucleotide
tgaggagtagtacttcccctt

SEQ ID NO: 32344 - RNA, 21 nt, synthetic construct
  source 1..21: mol_type = other RNA; note = Description of Artificial Sequence: Synthetic oligonucleotide
ttgaggagtagtacttccctt

SEQ ID NO: 32345 - RNA, 21 nt, synthetic construct
  source 1..21: mol_type = other RNA; note = Description of Artificial Sequence: Synthetic oligonucleotide
tttgaggagtagtacttcctt

SEQ ID NO: 32346 - RNA, 21 nt, synthetic construct
  source 1..21: mol_type = other RNA; note = Description of Artificial Sequence: Synthetic oligonucleotide
ttttgaggagtagtacttctt

SEQ ID NO: 32347 - RNA, 21 nt, synthetic construct
  source 1..21: mol_type = other RNA; note = Description of Artificial Sequence: Synthetic oligonucleotide
tatttgaggagtagtactttt

SEQ ID NO: 32348 - RNA, 21 nt, synthetic construct
  source 1..21: mol_type = other RNA; note = Description of Artificial Sequence: Synthetic oligonucleotide
tcatttgaggagtagtacttt

SEQ ID NO: 32349 - RNA, 21 nt, synthetic construct
  source 1..21: mol_type = other RNA; note = Description of Artificial Sequence: Synthetic oligonucleotide
tacatttgaggagtagtactt

SEQ ID NO: 32350 - RNA, 21 nt, synthetic construct
  source 1..21: mol_type = other RNA; note = Description of Artificial Sequence: Synthetic oligonucleotide
taacatttgaggagtagtatt

SEQ ID NO: 32351 - RNA, 21 nt, synthetic construct
  source 1..21: mol_type = other RNA; note = Description of Artificial Sequence: Synthetic oligonucleotide
tcaacatttgaggagtagttt

SEQ ID NO: 32352 - RNA, 21 nt, synthetic construct
  source 1..21: mol_type = other RNA; note = Description of Artificial Sequence: Synthetic oligonucleotide
ttcaacatttgaggagtagtt

SEQ ID NO: 32353 - RNA, 21 nt, synthetic construct
  source 1..21: mol_type = other RNA; note = Description of Artificial Sequence: Synthetic oligonucleotide
tctcaacatttgaggagtatt

SEQ ID NO: 32354 - RNA, 21 nt, synthetic construct
  source 1..21: mol_type = other RNA; note = Description of Artificial Sequence: Synthetic oligonucleotide
tcctcaacatttgaggagttt

SEQ ID NO: 32355 - RNA, 21 nt, synthetic construct
  source 1..21: mol_type = other RNA; note = Description of Artificial Sequence: Synthetic oligonucleotide
tccctcaacatttgaggagtt

SEQ ID NO: 32356 - RNA, 21 nt, synthetic construct
  source 1..21: mol_type = other RNA; note = Description of Artificial Sequence: Synthetic oligonucleotide
ttccctcaacatttgaggatt

SEQ ID NO: 32357 - RNA, 21 nt, synthetic construct
  source 1..21: mol_type = other RNA; note = Description of Artificial Sequence: Synthetic oligonucleotide
tttccctcaacatttgaggtt

SEQ ID NO: 32358 - RNA, 21 nt, synthetic construct
  source 1..21: mol_type = other RNA; note = Description of Artificial Sequence: Synthetic oligonucleotide
tcttccctcaacatttgagtt

SEQ ID NO: 32359 - RNA, 21 nt, synthetic construct
  source 1..21: mol_type = other RNA; note = Description of Artificial Sequence: Synthetic oligonucleotide
tgcttccctcaacatttgatt

SEQ ID NO: 32360 - RNA, 21 nt, synthetic construct
  source 1..21: mol_type = other RNA; note = Description of Artificial Sequence: Synthetic oligonucleotide
tagcttccctcaacatttgtt

SEQ ID NO: 32361 - RNA, 21 nt, synthetic construct
  source 1..21: mol_type = other RNA; note = Description of Artificial Sequence: Synthetic oligonucleotide
taagcttccctcaacattttt

SEQ ID NO: 32362 - RNA, 21 nt, synthetic construct
  source 1..21: mol_type = other RNA; note = Description of Artificial Sequence: Synthetic oligonucleotide
tgaagcttccctcaacatttt

SEQ ID NO: 32363 - RNA, 21 nt, synthetic construct
  source 1..21: mol_type = other RNA; note = Description of Artificial Sequence: Synthetic oligonucleotide
tggaagcttccctcaacattt

SEQ ID NO: 32364 - RNA, 21 nt, synthetic construct
  source 1..21: mol_type = other RNA; note = Description of Artificial Sequence: Synthetic oligonucleotide
ttggaagcttccctcaacatt

SEQ ID NO: 32365 - RNA, 21 nt, synthetic construct
  source 1..21: mol_type = other RNA; note = Description of Artificial Sequence: Synthetic oligonucleotide
tatggaagcttccctcaactt

SEQ ID NO: 32366 - RNA, 21 nt, synthetic construct
  source 1..21: mol_type = other RNA; note = Description of Artificial Sequence: Synthetic oligonucleotide
ttatggaagcttccctcaatt

SEQ ID NO: 32367 - RNA, 21 nt, synthetic construct
  source 1..21: mol_type = other RNA; note = Description of Artificial Sequence: Synthetic oligonucleotide
tttatggaagcttccctcatt

SEQ ID NO: 32368 - RNA, 21 nt, synthetic construct
  source 1..21: mol_type = other RNA; note = Description of Artificial Sequence: Synthetic oligonucleotide
tgttatggaagcttccctctt

SEQ ID NO: 32369 - RNA, 21 nt, synthetic construct
  source 1..21: mol_type = other RNA; note = Description of Artificial Sequence: Synthetic oligonucleotide
ttgttatggaagcttcccttt

SEQ ID NO: 32370 - RNA, 21 nt, synthetic construct
  source 1..21: mol_type = other RNA; note = Description of Artificial Sequence: Synthetic oligonucleotide
tatgttatggaagcttccctt

SEQ ID NO: 32371 - RNA, 21 nt, synthetic construct
  source 1..21: mol_type = other RNA; note = Description of Artificial Sequence: Synthetic oligonucleotide
taatgttatggaagcttcctt

SEQ ID NO: 32372 - RNA, 21 nt, synthetic construct
  source 1..21: mol_type = other RNA; note = Description of Artificial Sequence: Synthetic oligonucleotide
tcaatgttatggaagcttctt

SEQ ID NO: 32373 - RNA, 21 nt, synthetic construct
  source 1..21: mol_type = other RNA; note = Description of Artificial Sequence: Synthetic oligonucleotide
ttcaatgttatggaagctttt

SEQ ID NO: 32374 - RNA, 21 nt, synthetic construct
  source 1..21: mol_type = other RNA; note = Description of Artificial Sequence: Synthetic oligonucleotide
tatcaatgttatggaagcttt

SEQ ID NO: 32375 - RNA, 21 nt, synthetic construct
  source 1..21: mol_type = other RNA; note = Description of Artificial Sequence: Synthetic oligonucleotide
tcatcaatgttatggaagctt

SEQ ID NO: 32376 - RNA, 21 nt, synthetic construct
  source 1..21: mol_type = other RNA; note = Description of Artificial Sequence: Synthetic oligonucleotide
ttcatcaatgttatggaagtt

SEQ ID NO: 32377 - RNA, 21 nt, synthetic construct
  source 1..21: mol_type = other RNA; note = Description of Artificial Sequence: Synthetic oligonucleotide
tgtcatcaatgttatggaatt

SEQ ID NO: 32378 - RNA, 21 nt, synthetic construct
  source 1..21: mol_type = other RNA; note = Description of Artificial Sequence: Synthetic oligonucleotide
tagtcatcaatgttatggatt

SEQ ID NO: 32379 - RNA, 21 nt, synthetic construct
  source 1..21: mol_type = other RNA; note = Description of Artificial Sequence: Synthetic oligonucleotide
tcagtcatcaatgttatggtt

SEQ ID NO: 32380 - RNA, 21 nt, synthetic construct
  source 1..21: mol_type = other RNA; note = Description of Artificial Sequence: Synthetic oligonucleotide
tccagtcatcaatgttatgtt

SEQ ID NO: 32381 - RNA, 21 nt, synthetic construct
  source 1..21: mol_type = other RNA; note = Description of Artificial Sequence: Synthetic oligonucleotide
tgccagtcatcaatgttattt

SEQ ID NO: 32382 - RNA, 21 nt, synthetic construct
  source 1..21: mol_type = other RNA; note = Description of Artificial Sequence: Synthetic oligonucleotide
tagccagtcatcaatgttatt

SEQ ID NO: 32383 - RNA, 21 nt, synthetic construct
  source 1..21: mol_type = other RNA; note = Description of Artificial Sequence: Synthetic oligonucleotide
taagccagtcatcaatgtttt

SEQ ID NO: 32384 - RNA, 21 nt, synthetic construct
  source 1..21: mol_type = other RNA; note = Description of Artificial Sequence: Synthetic oligonucleotide
tgaagccagtcatcaatgttt

SEQ ID NO: 32385 - RNA, 21 nt, synthetic construct
  source 1..21: mol_type = other RNA; note = Description of Artificial Sequence: Synthetic oligonucleotide
ttgaagccagtcatcaatgtt

SEQ ID NO: 32386 - RNA, 21 nt, synthetic construct
  source 1..21: mol_type = other RNA; note = Description of Artificial Sequence: Synthetic oligonucleotide
tatgaagccagtcatcaattt

SEQ ID NO: 32387 - RNA, 21 nt, synthetic construct
  source 1..21: mol_type = other RNA; note = Description of Artificial Sequence: Synthetic oligonucleotide
tcatgaagccagtcatcaatt

SEQ ID NO: 32388 - RNA, 21 nt, synthetic construct
  source 1..21: mol_type = other RNA; note = Description of Artificial Sequence: Synthetic oligonucleotide
tccatgaagccagtcatcatt

SEQ ID NO: 32389 - RNA, 21 nt, synthetic construct
  source 1..21: mol_type = other RNA; note = Description of Artificial Sequence: Synthetic oligonucleotide
tgccatgaagccagtcatctt

SEQ ID NO: 32390 - RNA, 21 nt, synthetic construct
  source 1..21: mol_type = other RNA; note = Description of Artificial Sequence: Synthetic oligonucleotide
ttgccatgaagccagtcattt

SEQ ID NO: 32391 - RNA, 21 nt, synthetic construct
  source 1..21: mol_type = other RNA; note = Description of Artificial Sequence: Synthetic oligonucleotide
tctgccatgaagccagtcatt

SEQ ID NO: 32392 - RNA, 21 nt, synthetic construct
  source 1..21: mol_type = other RNA; note = Description of Artificial Sequence: Synthetic oligonucleotide
tactgccatgaagccagtctt

SEQ ID NO: 32393 - RNA, 21 nt, synthetic construct
  source 1..21: mol_type = other RNA; note = Description of Artificial Sequence: Synthetic oligonucleotide
ttactgccatgaagccagttt

SEQ ID NO: 32394 - RNA, 21 nt, synthetic construct
  source 1..21: mol_type = other RNA; note = Description of Artificial Sequence: Synthetic oligonucleotide
tttactgccatgaagccagtt

SEQ ID NO: 32395 - RNA, 21 nt, synthetic construct
  source 1..21: mol_type = other RNA; note = Description of Artificial Sequence: Synthetic oligonucleotide
tattactgccatgaagccatt

SEQ ID NO: 32396 - RNA, 21 nt, synthetic construct
  source 1..21: mol_type = other RNA; note = Description of Artificial Sequence: Synthetic oligonucleotide
taattactgccatgaagcctt

SEQ ID NO: 32397 - RNA, 21 nt, synthetic construct
  source 1..21: mol_type = other RNA; note = Description of Artificial Sequence: Synthetic oligonucleotide
tgaattactgccatgaagctt

SEQ ID NO: 32398 - RNA, 21 nt, synthetic construct
  source 1..21: mol_type = other RNA; note = Description of Artificial Sequence: Synthetic oligonucleotide
tagaattactgccatgaagtt

SEQ ID NO: 32399 - RNA, 21 nt, synthetic construct
  source 1..21: mol_type = other RNA; note = Description of Artificial Sequence: Synthetic oligonucleotide
tgagaattactgccatgaatt

SEQ ID NO: 32400 - RNA, 21 nt, synthetic construct
  source 1..21: mol_type = other RNA; note = Description of Artificial Sequence: Synthetic oligonucleotide
tcgagaattactgccatgatt

SEQ ID NO: 32401 - RNA, 21 nt, synthetic construct
  source 1..21: mol_type = other RNA; note = Description of Artificial Sequence: Synthetic oligonucleotide
tccgagaattactgccatgtt

SEQ ID NO: 32402 - RNA, 21 nt, synthetic construct
  source 1..21: mol_type = other RNA; note = Description of Artificial Sequence: Synthetic oligonucleotide
tgccgagaattactgccattt

SEQ ID NO: 32403 - RNA, 21 nt, synthetic construct
  source 1..21: mol_type = other RNA; note = Description of Artificial Sequence: Synthetic oligonucleotide
tagccgagaattactgccatt

SEQ ID NO: 32404 - RNA, 21 nt, synthetic construct
  source 1..21: mol_type = other RNA; note = Description of Artificial Sequence: Synthetic oligonucleotide
tcagccgagaattactgcctt

SEQ ID NO: 32405 - RNA, 21 nt, synthetic construct
  source 1..21: mol_type = other RNA; note = Description of Artificial Sequence: Synthetic oligonucleotide
tacagccgagaattactgctt

SEQ ID NO: 32406 - RNA, 21 nt, synthetic construct
  source 1..21: mol_type = other RNA; note = Description of Artificial Sequence: Synthetic oligonucleotide
ttacagccgagaattactgtt

SEQ ID NO: 32407 - RNA, 21 nt, synthetic construct
  source 1..21: mol_type = other RNA; note = Description of Artificial Sequence: Synthetic oligonucleotide
tctacagccgagaattacttt

SEQ ID NO: 32408 - RNA, 21 nt, synthetic construct
  source 1..21: mol_type = other RNA; note = Description of Artificial Sequence: Synthetic oligonucleotide
tactacagccgagaattactt

SEQ ID NO: 32409 - RNA, 21 nt, synthetic construct
  source 1..21: mol_type = other RNA; note = Description of Artificial Sequence: Synthetic oligonucleotide
taactacagccgagaattatt

SEQ ID NO: 32410 - RNA, 21 nt, synthetic construct
  source 1..21: mol_type = other RNA; note = Description of Artificial Sequence: Synthetic oligonucleotide
tcaactacagccgagaatttt

SEQ ID NO: 32411 - RNA, 21 nt, synthetic construct
  source 1..21: mol_type = other RNA; note = Description of Artificial Sequence: Synthetic oligonucleotide
tgcaactacagccgagaattt

SEQ ID NO: 32412 - RNA, 21 nt, synthetic construct
  source 1..21: mol_type = other RNA; note = Description of Artificial Sequence: Synthetic oligonucleotide
ttgcaactacagccgagaatt

SEQ ID NO: 32413 - RNA, 21 nt, synthetic construct
  source 1..21: mol_type = other RNA; note = Description of Artificial Sequence: Synthetic oligonucleotide
tatgcaactacagccgagatt

SEQ ID NO: 32414 - RNA, 21 nt, synthetic construct
  source 1..21: mol_type = other RNA; note = Description of Artificial Sequence: Synthetic oligonucleotide
ttatgcaactacagccgagtt

SEQ ID NO: 32415 - RNA, 21 nt, synthetic construct
  source 1..21: mol_type = other RNA; note = Description of Artificial Sequence: Synthetic oligonucleotide
tttatgcaactacagccgatt

SEQ ID NO: 32416 - RNA, 21 nt, synthetic construct
  source 1..21: mol_type = other RNA; note = Description of Artificial Sequence: Synthetic oligonucleotide
tcttatgcaactacagccgtt

SEQ ID NO: 32417 - RNA, 21 nt, synthetic construct
  source 1..21: mol_type = other RNA; note = Description of Artificial Sequence: Synthetic oligonucleotide
tgcttatgcaactacagcctt

SEQ ID NO: 32418 - RNA, 21 nt, synthetic construct
  source 1..21: mol_type = other RNA; note = Description of Artificial Sequence: Synthetic oligonucleotide
ttgcttatgcaactacagctt

SEQ ID NO: 32419 - RNA, 21 nt, synthetic construct
  source 1..21: mol_type = other RNA; note = Description of Artificial Sequence: Synthetic oligonucleotide
tatgcttatgcaactacagtt

SEQ ID NO: 32420 - RNA, 21 nt, synthetic construct
  source 1..21: mol_type = other RNA; note = Description of Artificial Sequence: Synthetic oligonucleotide
taatgcttatgcaactacatt

SEQ ID NO: 32421 - RNA, 21 nt, synthetic construct
  source 1..21: mol_type = other RNA; note = Description of Artificial Sequence: Synthetic oligonucleotide
tcaatgcttatgcaactactt

SEQ ID NO: 32422 - RNA, 21 nt, synthetic construct
  source 1..21: mol_type = other RNA; note = Description of Artificial Sequence: Synthetic oligonucleotide
tgcaatgcttatgcaactatt

SEQ ID NO: 32423 - RNA, 21 nt, synthetic construct
  source 1..21: mol_type = other RNA; note = Description of Artificial Sequence: Synthetic oligonucleotide
tagcaatgcttatgcaacttt

SEQ ID NO: 32424 - RNA, 21 nt, synthetic construct
  source 1..21: mol_type = other RNA; note = Description of Artificial Sequence: Synthetic oligonucleotide
tgagcaatgcttatgcaactt

SEQ ID NO: 32425 - RNA, 21 nt, synthetic construct
  source 1..21: mol_type = other RNA; note = Description of Artificial Sequence: Synthetic oligonucleotide
ttgagcaatgcttatgcaatt

SEQ ID NO: 32426 - RNA, 21 nt, synthetic construct
  source 1..21: mol_type = other RNA; note = Description of Artificial Sequence: Synthetic oligonucleotide
tttgagcaatgcttatgcatt

SEQ ID NO: 32427 - RNA, 21 nt, synthetic construct
  source 1..21: mol_type = other RNA; note = Description of Artificial Sequence: Synthetic oligonucleotide
tcttgagcaatgcttatgctt

SEQ ID NO: 32428 - RNA, 21 nt, synthetic construct
  source 1..21: mol_type = other RNA; note = Description of Artificial Sequence: Synthetic oligonucleotide
ttcttgagcaatgcttatgtt

SEQ ID NO: 32429 - RNA, 21 nt, synthetic construct
  source 1..21: mol_type = other RNA; note = Description of Artificial Sequence: Synthetic oligonucleotide
tctcttgagcaatgcttattt

SEQ ID NO: 32430 - RNA, 21 nt, synthetic construct
  source 1..21: mol_type = other RNA; note = Description of Artificial Sequence: Synthetic oligonucleotide
tcctcttgagcaatgcttatt

SEQ ID NO: 32431 - RNA, 21 nt, synthetic construct
  source 1..21: mol_type = other RNA; note = Description of Artificial Sequence: Synthetic oligonucleotide
ttcctcttgagcaatgctttt

SEQ ID NO: 32432 - RNA, 21 nt, synthetic construct
  source 1..21: mol_type = other RNA; note = Description of Artificial Sequence: Synthetic oligonucleotide
tttcctcttgagcaatgcttt

SEQ ID NO: 32433 - RNA, 21 nt, synthetic construct
  source 1..21: mol_type = other RNA; note = Description of Artificial Sequence: Synthetic oligonucleotide
ttttcctcttgagcaatgctt

SEQ ID NO: 32434 - RNA, 21 nt, synthetic construct
  source 1..21: mol_type = other RNA; note = Description of Artificial Sequence: Synthetic oligonucleotide
tttttcctcttgagcaatgtt

SEQ ID NO: 32435 - RNA, 21 nt, synthetic construct
  source 1..21: mol_type = other RNA; note = Description of Artificial Sequence: Synthetic oligonucleotide
tattttcctcttgagcaattt

SEQ ID NO: 32436 - RNA, 21 nt, synthetic construct
  source 1..21: mol_type = other RNA; note = Description of Artificial Sequence: Synthetic oligonucleotide
tgattttcctcttgagcaatt

SEQ ID NO: 32437 - RNA, 21 nt, synthetic construct
  source 1..21: mol_type = other RNA; note = Description of Artificial Sequence: Synthetic oligonucleotide
tggattttcctcttgagcatt

SEQ ID NO: 32438 - RNA, 21 nt, synthetic construct
  source 1..21: mol_type = other RNA; note = Description of Artificial Sequence: Synthetic oligonucleotide
ttggattttcctcttgagctt

SEQ ID NO: 32439 - RNA, 21 nt, synthetic construct
  source 1..21: mol_type = other RNA; note = Description of Artificial Sequence: Synthetic oligonucleotide
tttggattttcctcttgagtt

SEQ ID NO: 32440 - RNA, 21 nt, synthetic construct
  source 1..21: mol_type = other RNA; note = Description of Artificial Sequence: Synthetic oligonucleotide
ttttggattttcctcttgatt

SEQ ID NO: 32441 - RNA, 21 nt, synthetic construct
  source 1..21: mol_type = other RNA; note = Description of Artificial Sequence: Synthetic oligonucleotide
tttttggattttcctcttgtt

SEQ ID NO: 32442 - RNA, 21 nt, synthetic construct
  source 1..21: mol_type = other RNA; note = Description of Artificial Sequence: Synthetic oligonucleotide
tcttttggattttcctctttt

SEQ ID NO: 32443 - RNA, 21 nt, synthetic construct
  source 1..21: mol_type = other RNA; note = Description of Artificial Sequence: Synthetic oligonucleotide
tacttttggattttcctcttt

SEQ ID NO: 32444 - RNA, 21 nt, synthetic construct
  source 1..21: mol_type = other RNA; note = Description of Artificial Sequence: Synthetic oligonucleotide
tcacttttggattttcctctt

SEQ ID NO: 32445 - RNA, 21 nt, synthetic construct
  source 1..21: mol_type = other RNA; note = Description of Artificial Sequence: Synthetic oligonucleotide
tgcacttttggattttccttt

SEQ ID NO: 32446 - RNA, 21 nt, synthetic construct
  source 1..21: mol_type = other RNA; note = Description of Artificial Sequence: Synthetic oligonucleotide
ttgcacttttggattttcctt

SEQ ID NO: 32447 - RNA, 21 nt, synthetic construct
  source 1..21: mol_type = other RNA; note = Description of Artificial Sequence: Synthetic oligonucleotide
tctgcacttttggattttctt

SEQ ID NO: 32448 - RNA, 21 nt, synthetic construct
  source 1..21: mol_type = other RNA; note = Description of Artificial Sequence: Synthetic oligonucleotide
tgctgcacttttggatttttt

SEQ ID NO: 32449 - RNA, 21 nt, synthetic construct
  source 1..21: mol_type = other RNA; note = Description of Artificial Sequence: Synthetic oligonucleotide
ttgctgcacttttggattttt

SEQ ID NO: 32450 - RNA, 21 nt, synthetic construct
  source 1..21: mol_type = other RNA; note = Description of Artificial Sequence: Synthetic oligonucleotide
tctgctgcacttttggatttt

SEQ ID NO: 32451 - RNA, 21 nt, synthetic construct
  source 1..21: mol_type = other RNA; note = Description of Artificial Sequence: Synthetic oligonucleotide
tcctgctgcacttttggattt

SEQ ID NO: 32452 - RNA, 21 nt, synthetic construct
  source 1..21: mol_type = other RNA; note = Description of Artificial Sequence: Synthetic oligonucleotide
ttcctgctgcacttttggatt

SEQ ID NO: 32453 - RNA, 21 nt, synthetic construct
  source 1..21: mol_type = other RNA; note = Description of Artificial Sequence: Synthetic oligonucleotide
tctcctgctgcacttttggtt

SEQ ID NO: 32454 - RNA, 21 nt, synthetic construct
  source 1..21: mol_type = other RNA; note = Description of Artificial Sequence: Synthetic oligonucleotide
ttctcctgctgcacttttgtt

SEQ ID NO: 32455 - RNA, 21 nt, synthetic construct
  source 1..21: mol_type = other RNA; note = Description of Artificial Sequence: Synthetic oligonucleotide
tttctcctgctgcactttttt

SEQ ID NO: 32456 - RNA, 21 nt, synthetic construct
  source 1..21: mol_type = other RNA; note = Description of Artificial Sequence: Synthetic oligonucleotide
tgttctcctgctgcacttttt

SEQ ID NO: 32457 - RNA, 21 nt, synthetic construct
  source 1..21: mol_type = other RNA; note = Description of Artificial Sequence: Synthetic oligonucleotide
tagttctcctgctgcactttt

SEQ ID NO: 32458 - RNA, 21 nt, synthetic construct
  source 1..21: mol_type = other RNA; note = Description of Artificial Sequence: Synthetic oligonucleotide
tgagttctcctgctgcacttt

SEQ ID NO: 32459 - RNA, 21 nt, synthetic construct
  source 1..21: mol_type = other RNA; note = Description of Artificial Sequence: Synthetic oligonucleotide
tagagttctcctgctgcactt

SEQ ID NO: 32460 - RNA, 21 nt, synthetic construct
  source 1..21: mol_type = other RNA; note = Description of Artificial Sequence: Synthetic oligonucleotide
taagagttctcctgctgcatt

SEQ ID NO: 32461 - RNA, 21 nt, synthetic construct
  source 1..21: mol_type = other RNA; note = Description of Artificial Sequence: Synthetic oligonucleotide
taaagagttctcctgctgctt

SEQ ID NO: 32462 - RNA, 21 nt, synthetic construct
  source 1..21: mol_type = other RNA; note = Description of Artificial Sequence: Synthetic oligonucleotide
taaaagagttctcctgctgtt

SEQ ID NO: 32463 - RNA, 21 nt, synthetic construct
  source 1..21: mol_type = other RNA; note = Description of Artificial Sequence: Synthetic oligonucleotide
tgaaaagagttctcctgcttt

SEQ ID NO: 32464 - RNA, 21 nt, synthetic construct
  source 1..21: mol_type = other RNA; note = Description of Artificial Sequence: Synthetic oligonucleotide
tggaaaagagttctcctgctt

SEQ ID NO: 32465 - RNA, 21 nt, synthetic construct
  source 1..21: mol_type = other RNA; note = Description of Artificial Sequence: Synthetic oligonucleotide
tgggaaaagagttctcctgtt

SEQ ID NO: 32466 - RNA, 21 nt, synthetic construct
  source 1..21: mol_type = other RNA; note = Description of Artificial Sequence: Synthetic oligonucleotide
tagggaaaagagttctccttt

SEQ ID NO: 32467 - RNA, 21 nt, synthetic construct
  source 1..21: mol_type = other RNA; note = Description of Artificial Sequence: Synthetic oligonucleotide
tcagggaaaagagttctcctt

SEQ ID NO: 32468 - RNA, 21 nt, synthetic construct
  source 1..21: mol_type = other RNA; note = Description of Artificial Sequence: Synthetic oligonucleotide
ttcagggaaaagagttctctt

SEQ ID NO: 32469 - RNA, 21 nt, synthetic construct
  source 1..21: mol_type = other RNA; note = Description of Artificial Sequence: Synthetic oligonucleotide
tttcagggaaaagagttcttt

SEQ ID NO: 32470 - RNA, 21 nt, synthetic construct
  source 1..21: mol_type = other RNA; note = Description of Artificial Sequence: Synthetic oligonucleotide
ttttcagggaaaagagttctt

SEQ ID NO: 32471 - RNA, 21 nt, synthetic construct
  source 1..21: mol_type = other RNA; note = Description of Artificial Sequence: Synthetic oligonucleotide
tttttcagggaaaagagtttt

SEQ ID NO: 32472 - RNA, 21 nt, synthetic construct
  source 1..21: mol_type = other RNA; note = Description of Artificial Sequence: Synthetic oligonucleotide
ttttttcagggaaaagagttt

SEQ ID NO: 32473 - RNA, 21 nt, synthetic construct
  source 1..21: mol_type = other RNA; note = Description of Artificial Sequence: Synthetic oligonucleotide
tctttttcagggaaaagagtt

SEQ ID NO: 32474 - RNA, 21 nt, synthetic construct
  source 1..21: mol_type = other RNA; note = Description of Artificial Sequence: Synthetic oligonucleotide
tcctttttcagggaaaagatt

SEQ ID NO: 32475 - RNA, 21 nt, synthetic construct
  source 1..21: mol_type = other RNA; note = Description of Artificial Sequence: Synthetic oligonucleotide
ttcctttttcagggaaaagtt

SEQ ID NO: 32476 - RNA, 21 nt, synthetic construct
  source 1..21: mol_type = other RNA; note = Description of Artificial Sequence: Synthetic oligonucleotide
tttcctttttcagggaaaatt

SEQ ID NO: 32477 - RNA, 21 nt, synthetic construct
  source 1..21: mol_type = other RNA; note = Description of Artificial Sequence: Synthetic oligonucleotide
ttttcctttttcagggaaatt

SEQ ID NO: 32478 - RNA, 21 nt, synthetic construct
  source 1..21: mol_type = other RNA; note = Description of Artificial Sequence: Synthetic oligonucleotide
tttttcctttttcagggaatt

SEQ ID NO: 32479 - RNA, 21 nt, synthetic construct
  source 1..21: mol_type = other RNA; note = Description of Artificial Sequence: Synthetic oligonucleotide
ttttttcctttttcagggatt

SEQ ID NO: 32480 - RNA, 21 nt, synthetic construct
  source 1..21: mol_type = other RNA; note = Description of Artificial Sequence: Synthetic oligonucleotide
tatttttcctttttcagggtt

SEQ ID NO: 32481 - RNA, 21 nt, synthetic construct
  source 1..21: mol_type = other RNA; note = Description of Artificial Sequence: Synthetic oligonucleotide
ttatttttcctttttcaggtt

SEQ ID NO: 32482 - RNA, 21 nt, synthetic construct
  source 1..21: mol_type = other RNA; note = Description of Artificial Sequence: Synthetic oligonucleotide
tatatttttcctttttcagtt

SEQ ID NO: 32483 - RNA, 21 nt, synthetic construct
  source 1..21: mol_type = other RNA; note = Description of Artificial Sequence: Synthetic oligonucleotide
taatatttttcctttttcatt

SEQ ID NO: 32484 - RNA, 21 nt, synthetic construct
  source 1..21: mol_type = other RNA; note = Description of Artificial Sequence: Synthetic oligonucleotide
tcaatatttttcctttttctt

SEQ ID NO: 32485 - RNA, 21 nt, synthetic construct
  source 1..21: mol_type = other RNA; note = Description of Artificial Sequence: Synthetic oligonucleotide
ttcaatatttttccttttttt

SEQ ID NO: 32486 - RNA, 21 nt, synthetic construct
  source 1..21: mol_type = other RNA; note = Description of Artificial Sequence: Synthetic oligonucleotide
tttcaatatttttcctttttt

SEQ ID NO: 32487 - RNA, 21 nt, synthetic construct
  source 1..21: mol_type = other RNA; note = Description of Artificial Sequence: Synthetic oligonucleotide
tgttcaatatttttccttttt

SEQ ID NO: 32488 - RNA, 21 nt, synthetic construct
  source 1..21: mol_type = other RNA; note = Description of Artificial Sequence: Synthetic oligonucleotide
tagttcaatatttttcctttt

SEQ ID NO: 32489 - RNA, 21 nt, synthetic construct
  source 1..21: mol_type = other RNA; note = Description of Artificial Sequence: Synthetic oligonucleotide
tgagttcaatatttttccttt

SEQ ID NO: 32490 - RNA, 21 nt, synthetic construct
  source 1..21: mol_type = other RNA; note = Description of Artificial Sequence: Synthetic oligonucleotide
ttgagttcaatatttttcctt

SEQ ID NO: 32491 - RNA, 21 nt, synthetic construct
  source 1..21: mol_type = other RNA; note = Description of Artificial Sequence: Synthetic oligonucleotide
tttgagttcaatatttttctt

SEQ ID NO: 32492 - RNA, 21 nt, synthetic construct
  source 1..21: mol_type = other RNA; note = Description of Artificial Sequence: Synthetic oligonucleotide
tattgagttcaatattttttt

SEQ ID NO: 32493 - RNA, 21 nt, synthetic construct
  source 1..21: mol_type = other RNA; note = Description of Artificial Sequence: Synthetic oligonucleotide
tcattgagttcaatatttttt

SEQ ID NO: 32494 - RNA, 21 nt, synthetic construct
  source 1..21: mol_type = other RNA; note = Description of Artificial Sequence: Synthetic oligonucleotide
ttcattgagttcaatattttt

SEQ ID NO: 32495 - RNA, 21 nt, synthetic construct
  source 1..21: mol_type = other RNA; note = Description of Artificial Sequence: Synthetic oligonucleotide
tatcattgagttcaatatttt

SEQ ID NO: 32496 - RNA, 21 nt, synthetic construct
  source 1..21: mol_type = other RNA; note = Description of Artificial Sequence: Synthetic oligonucleotide
ttatcattgagttcaatattt

SEQ ID NO: 32497 - RNA, 21 nt, synthetic construct
  source 1..21: mol_type = other RNA; note = Description of Artificial Sequence: Synthetic oligonucleotide
tctatcattgagttcaatatt

SEQ ID NO: 32498 - RNA, 21 nt, synthetic construct
  source 1..21: mol_type = other RNA; note = Description of Artificial Sequence: Synthetic oligonucleotide
tgctatcattgagttcaattt

SEQ ID NO: 32499 - RNA, 21 nt, synthetic construct
  source 1..21: mol_type = other RNA; note = Description of Artificial Sequence: Synthetic oligonucleotide
ttgctatcattgagttcaatt

SEQ ID NO: 32500 - RNA, 21 nt, synthetic construct
  source 1..21: mol_type = other RNA; note = Description of Artificial Sequence: Synthetic oligonucleotide
tgtgctatcattgagttcatt

SEQ ID NO: 32501 - RNA, 21 nt, synthetic construct
  source 1..21: mol_type = other RNA; note = Description of Artificial Sequence: Synthetic oligonucleotide
tggtgctatcattgagttctt

SEQ ID NO: 32502 - RNA, 21 nt, synthetic construct
  source 1..21: mol_type = other RNA; note = Description of Artificial Sequence: Synthetic oligonucleotide
taggtgctatcattgagtttt

SEQ ID NO: 32503 - RNA, 21 nt, synthetic construct
  source 1..21: mol_type = other RNA; note = Description of Artificial Sequence: Synthetic oligonucleotide
ttaggtgctatcattgagttt

SEQ ID NO: 32504 - RNA, 21 nt, synthetic construct
  source 1..21: mol_type = other RNA; note = Description of Artificial Sequence: Synthetic oligonucleotide
tttaggtgctatcattgagtt

SEQ ID NO: 32505 - RNA, 21 nt, synthetic construct
  source 1..21: mol_type = other RNA; note = Description of Artificial Sequence: Synthetic oligonucleotide
ttttaggtgctatcattgatt

SEQ ID NO: 32506 - RNA, 21 nt, synthetic construct
  source 1..21: mol_type = other RNA; note = Description of Artificial Sequence: Synthetic oligonucleotide
tgtttaggtgctatcattgtt

SEQ ID NO: 32507 - RNA, 21 nt, synthetic construct
  source 1..21: mol_type = other RNA; note = Description of Artificial Sequence: Synthetic oligonucleotide
tagtttaggtgctatcatttt

SEQ ID NO: 32508 - RNA, 21 nt, synthetic construct
  source 1..21: mol_type = other RNA; note = Description of Artificial Sequence: Synthetic oligonucleotide
taagtttaggtgctatcattt

SEQ ID NO: 32509 - RNA, 21 nt, synthetic construct
  source 1..21: mol_type = other RNA; note = Description of Artificial Sequence: Synthetic oligonucleotide
ttaagtttaggtgctatcatt

SEQ ID NO: 32510 - RNA, 21 nt, synthetic construct
  source 1..21: mol_type = other RNA; note = Description of Artificial Sequence: Synthetic oligonucleotide
tgtaagtttaggtgctatctt

SEQ ID NO: 32511 - RNA, 21 nt, synthetic construct
  source 1..21: mol_type = other RNA; note = Description of Artificial Sequence: Synthetic oligonucleotide
ttgtaagtttaggtgctattt

SEQ ID NO: 32512 - RNA, 21 nt, synthetic construct
  source 1..21: mol_type = other RNA; note = Description of Artificial Sequence: Synthetic oligonucleotide
tatgtaagtttaggtgctatt

SEQ ID NO: 32513 - RNA, 21 nt, synthetic construct
  source 1..21: mol_type = other RNA; note = Description of Artificial Sequence: Synthetic oligonucleotide
taatgtaagtttaggtgcttt

SEQ ID NO: 32514 - RNA, 21 nt, synthetic construct
  source 1..21: mol_type = other RNA; note = Description of Artificial Sequence: Synthetic oligonucleotide
taaatgtaagtttaggtgctt

SEQ ID NO: 32515 - RNA, 21 nt, synthetic construct
  source 1..21: mol_type = other RNA; note = Description of Artificial Sequence: Synthetic oligonucleotide
ttaaatgtaagtttaggtgtt

SEQ ID NO: 32516 - RNA, 21 nt, synthetic construct
  source 1..21: mol_type = other RNA; note = Description of Artificial Sequence: Synthetic oligonucleotide
tttaaatgtaagtttaggttt

SEQ ID NO: 32517 - RNA, 21 nt, synthetic construct
  source 1..21: mol_type = other RNA; note = Description of Artificial Sequence: Synthetic oligonucleotide
ttttaaatgtaagtttaggtt

SEQ ID NO: 32518 - RNA, 21 nt, synthetic construct
  source 1..21: mol_type = other RNA; note = Description of Artificial Sequence: Synthetic oligonucleotide
tttttaaatgtaagtttagtt

SEQ ID NO: 32519 - RNA, 21 nt, synthetic construct
  source 1..21: mol_type = other RNA; note = Description of Artificial Sequence: Synthetic oligonucleotide
tcttttaaatgtaagtttatt

SEQ ID NO: 32520 - RNA, 21 nt, synthetic construct
  source 1..21: mol_type = other RNA; note = Description of Artificial Sequence: Synthetic oligonucleotide
ttcttttaaatgtaagttttt

SEQ ID NO: 32521 - RNA, 21 nt, synthetic construct
  source 1..21: mol_type = other RNA; note = Description of Artificial Sequence: Synthetic oligonucleotide
tgtcttttaaatgtaagtttt

SEQ ID NO: 32522 - RNA, 21 nt, synthetic construct
  source 1..21: mol_type = other RNA; note = Description of Artificial Sequence: Synthetic oligonucleotide
ttgtcttttaaatgtaagttt

SEQ ID NO: 32523 - RNA, 21 nt, synthetic construct
  source 1..21: mol_type = other RNA; note = Description of Artificial Sequence: Synthetic oligonucleotide
tctgtcttttaaatgtaagtt

SEQ ID NO: 32524 - RNA, 21 nt, synthetic construct
  source 1..21: mol_type = other RNA; note = Description of Artificial Sequence: Synthetic oligonucleotide
ttctgtcttttaaatgtaatt

SEQ ID NO: 32525 - RNA, 21 nt, synthetic construct
  source 1..21: mol_type = other RNA; note = Description of Artificial Sequence: Synthetic oligonucleotide
tgtctgtcttttaaatgtatt

SEQ ID NO: 32526 - RNA, 21 nt, synthetic construct
  source 1..21: mol_type = other RNA; note = Description of Artificial Sequence: Synthetic oligonucleotide
ttgtctgtcttttaaatgttt

SEQ ID NO: 32527 - RNA, 21 nt, synthetic construct
  source 1..21: mol_type = other RNA; note = Description of Artificial Sequence: Synthetic oligonucleotide
tatgtctgtcttttaaatgtt

SEQ ID NO: 32528 - RNA, 21 nt, synthetic construct
  source 1..21: mol_type = other RNA; note = Description of Artificial Sequence: Synthetic oligonucleotide
taatgtctgtcttttaaattt

SEQ ID NO: 32529 - RNA, 21 nt, synthetic construct
  source 1..21: mol_type = other RNA; note = Description of Artificial Sequence: Synthetic oligonucleotide
tgaatgtctgtcttttaaatt

SEQ ID NO: 32530 - RNA, 21 nt, synthetic construct
  source 1..21: mol_type = other RNA; note = Description of Artificial Sequence: Synthetic oligonucleotide
tggaatgtctgtcttttaatt

SEQ ID NO: 32531 - RNA, 21 nt, synthetic construct
  source 1..21: mol_type = other RNA; note = Description of Artificial Sequence: Synthetic oligonucleotide
taggaatgtctgtcttttatt

SEQ ID NO: 32532 - RNA, 21 nt, synthetic construct
  source 1..21: mol_type = other RNA; note = Description of Artificial Sequence: Synthetic oligonucleotide
taaggaatgtctgtctttttt

SEQ ID NO: 32533 - RNA, 21 nt, synthetic construct
  source 1..21: mol_type = other RNA; note = Description of Artificial Sequence: Synthetic oligonucleotide
tgaaggaatgtctgtcttttt

SEQ ID NO: 32534 - RNA, 21 nt, synthetic construct
  source 1..21: mol_type = other RNA; note = Description of Artificial Sequence: Synthetic oligonucleotide
tagaaggaatgtctgtctttt

SEQ ID NO: 32535 - RNA, 21 nt, synthetic construct
  source 1..21: mol_type = other RNA; note = Description of Artificial Sequence: Synthetic oligonucleotide
ttagaaggaatgtctgtcttt

SEQ ID NO: 32536 - RNA, 21 nt, synthetic construct
  source 1..21: mol_type = other RNA; note = Description of Artificial Sequence: Synthetic oligonucleotide
tgtagaaggaatgtctgtctt

SEQ ID NO: 32537 - RNA, 21 nt, synthetic construct
  source 1..21: mol_type = other RNA; note = Description of Artificial Sequence: Synthetic oligonucleotide
ttgtagaaggaatgtctgttt

SEQ ID NO: 32538 - RNA, 21 nt, synthetic construct
  source 1..21: mol_type = other RNA; note = Description of Artificial Sequence: Synthetic oligonucleotide
tatgtagaaggaatgtctgtt

SEQ ID NO: 32539 - RNA, 21 nt, synthetic construct
  source 1..21: mol_type = other RNA; note = Description of Artificial Sequence: Synthetic oligonucleotide
tcatgtagaaggaatgtcttt

SEQ ID NO: 32540 - RNA, 21 nt, synthetic construct
  source 1..21: mol_type = other RNA; note = Description of Artificial Sequence: Synthetic oligonucleotide
tacatgtagaaggaatgtctt

SEQ ID NO: 32541 - RNA, 21 nt, synthetic construct
  source 1..21: mol_type = other RNA; note = Description of Artificial Sequence: Synthetic oligonucleotide
ttacatgtagaaggaatgttt

SEQ ID NO: 32542 - RNA, 21 nt, synthetic construct
  source 1..21: mol_type = other RNA; note = Description of Artificial Sequence: Synthetic oligonucleotide
tttacatgtagaaggaatgtt

SEQ ID NO: 32543 - RNA, 21 nt, synthetic construct
  source 1..21: mol_type = other RNA; note = Description of Artificial Sequence: Synthetic oligonucleotide
tattacatgtagaaggaattt

SEQ ID NO: 32544 - RNA, 21 nt, synthetic construct
  source 1..21: mol_type = other RNA; note = Description of Artificial Sequence: Synthetic oligonucleotide
tcattacatgtagaaggaatt

SEQ ID NO: 32545 - RNA, 21 nt, synthetic construct
  source 1..21: mol_type = other RNA; note = Description of Artificial Sequence: Synthetic oligonucleotide
ttcattacatgtagaaggatt

SEQ ID NO: 32546 - RNA, 21 nt, synthetic construct
  source 1..21: mol_type = other RNA; note = Description of Artificial Sequence: Synthetic oligonucleotide
tgtcattacatgtagaaggtt

SEQ ID NO: 32547 - RNA, 21 nt, synthetic construct
  source 1..21: mol_type = other RNA; note = Description of Artificial Sequence: Synthetic oligonucleotide
ttgtcattacatgtagaagtt

SEQ ID NO: 32548 - RNA, 21 nt, synthetic construct
  source 1..21: mol_type = other RNA; note = Description of Artificial Sequence: Synthetic oligonucleotide
tgtgtcattacatgtagaatt

SEQ ID NO: 32549 - RNA, 21 nt, synthetic construct
  source 1..21: mol_type = other RNA; note = Description of Artificial Sequence: Synthetic oligonucleotide
tagtgtcattacatgtagatt

SEQ ID NO: 32550 - RNA, 21 nt, synthetic construct
  source 1..21: mol_type = other RNA; note = Description of Artificial Sequence: Synthetic oligonucleotide
taagtgtcattacatgtagtt

SEQ ID NO: 32551 - RNA, 21 nt, synthetic construct
  source 1..21: mol_type = other RNA; note = Description of Artificial Sequence: Synthetic oligonucleotide
tgaagtgtcattacatgtatt

SEQ ID NO: 32552 - RNA, 21 nt, synthetic construct
  source 1..21: mol_type = other RNA; note = Description of Artificial Sequence: Synthetic oligonucleotide
tagaagtgtcattacatgttt

SEQ ID NO: 32553 - RNA, 21 nt, synthetic construct
  source 1..21: mol_type = other RNA; note = Description of Artificial Sequence: Synthetic oligonucleotide
taagaagtgtcattacatgtt

SEQ ID NO: 32554 - RNA, 21 nt, synthetic construct
  source 1..21: mol_type = other RNA; note = Description of Artificial Sequence: Synthetic oligonucleotide
tcaagaagtgtcattacattt

SEQ ID NO: 32555 - RNA, 21 nt, synthetic construct
  source 1..21: mol_type = other RNA; note = Description of Artificial Sequence: Synthetic oligonucleotide
tacaagaagtgtcattacatt

SEQ ID NO: 32556 - RNA, 21 nt, synthetic construct
  source 1..21: mol_type = other RNA; note = Description of Artificial Sequence: Synthetic oligonucleotide
tcacaagaagtgtcattactt

SEQ ID NO: 32557 - RNA, 21 nt, synthetic construct
  source 1..21: mol_type = other RNA; note = Description of Artificial Sequence: Synthetic oligonucleotide
tacacaagaagtgtcattatt

SEQ ID NO: 32558 - RNA, 21 nt, synthetic construct
  source 1..21: mol_type = other RNA; note = Description of Artificial Sequence: Synthetic oligonucleotide
taacacaagaagtgtcatttt

SEQ ID NO: 32559 - RNA, 21 nt, synthetic construct
  source 1..21: mol_type = other RNA; note = Description of Artificial Sequence: Synthetic oligonucleotide
ttaacacaagaagtgtcattt

SEQ ID NO: 32560 - RNA, 21 nt, synthetic construct
  source 1..21: mol_type = other RNA; note = Description of Artificial Sequence: Synthetic oligonucleotide
tttaacacaagaagtgtcatt

SEQ ID NO: 32561 - RNA, 21 nt, synthetic construct
  source 1..21: mol_type = other RNA; note = Description of Artificial Sequence: Synthetic oligonucleotide
ttttaacacaagaagtgtctt

SEQ ID NO: 32562 - RNA, 21 nt, synthetic construct
  source 1..21: mol_type = other RNA; note = Description of Artificial Sequence: Synthetic oligonucleotide
tgtttaacacaagaagtgttt

SEQ ID NO: 32563 - RNA, 21 nt, synthetic construct
  source 1..21: mol_type = other RNA; note = Description of Artificial Sequence: Synthetic oligonucleotide
tagtttaacacaagaagtgtt

SEQ ID NO: 32564 - RNA, 21 nt, synthetic construct
  source 1..21: mol_type = other RNA; note = Description of Artificial Sequence: Synthetic oligonucleotide
ttagtttaacacaagaagttt

SEQ ID NO: 32565 - RNA, 21 nt, synthetic construct
  source 1..21: mol_type = other RNA; note = Description of Artificial Sequence: Synthetic oligonucleotide
tttagtttaacacaagaagtt

SEQ ID NO: 32566 - RNA, 21 nt, synthetic construct
  source 1..21: mol_type = other RNA; note = Description of Artificial Sequence: Synthetic oligonucleotide
ttttagtttaacacaagaatt

SEQ ID NO: 32567 - RNA, 21 nt, synthetic construct
  source 1..21: mol_type = other RNA; note = Description of Artificial Sequence: Synthetic oligonucleotide
tttttagtttaacacaagatt

SEQ ID NO: 32568 - RNA, 21 nt, synthetic construct
  source 1..21: mol_type = other RNA; note = Description of Artificial Sequence: Synthetic oligonucleotide
ttttttagtttaacacaagtt

SEQ ID NO: 32569 - RNA, 21 nt, synthetic construct
  source 1..21: mol_type = other RNA; note = Description of Artificial Sequence: Synthetic oligonucleotide
tatttttagtttaacacaatt

SEQ ID NO: 32570 - RNA, 21 nt, synthetic construct
  source 1..21: mol_type = other RNA; note = Description of Artificial Sequence: Synthetic oligonucleotide
taatttttagtttaacacatt

SEQ ID NO: 32571 - RNA, 21 nt, synthetic construct
  source 1..21: mol_type = other RNA; note = Description of Artificial Sequence: Synthetic oligonucleotide
taaatttttagtttaacactt

SEQ ID NO: 32572 - RNA, 21 nt, synthetic construct
  source 1..21: mol_type = other RNA; note = Description of Artificial Sequence: Synthetic oligonucleotide
ttaaatttttagtttaacatt

SEQ ID NO: 32573 - RNA, 21 nt, synthetic construct
  source 1..21: mol_type = other RNA; note = Description of Artificial Sequence: Synthetic oligonucleotide
tgtaaatttttagtttaactt

SEQ ID NO: 32574 - RNA, 21 nt, synthetic construct
  source 1..21: mol_type = other RNA; note = Description of Artificial Sequence: Synthetic oligonucleotide
ttgtaaatttttagtttaatt

SEQ ID NO: 32575 - RNA, 21 nt, synthetic construct
  source 1..21: mol_type = other RNA; note = Description of Artificial Sequence: Synthetic oligonucleotide
tttgtaaatttttagtttatt

SEQ ID NO: 32576 - RNA, 21 nt, synthetic construct
  source 1..21: mol_type = other RNA; note = Description of Artificial Sequence: Synthetic oligonucleotide
tcttgtaaatttttagttttt

SEQ ID NO: 32577 - RNA, 21 nt, synthetic construct
  source 1..21: mol_type = other RNA; note = Description of Artificial Sequence: Synthetic oligonucleotide
ttcttgtaaatttttagtttt

SEQ ID NO: 32578 - RNA, 21 nt, synthetic construct
  source 1..21: mol_type = other RNA; note = Description of Artificial Sequence: Synthetic oligonucleotide
tctcttgtaaatttttagttt

SEQ ID NO: 32579 - RNA, 21 nt, synthetic construct
  source 1..21: mol_type = other RNA; note = Description of Artificial Sequence: Synthetic oligonucleotide
ttctcttgtaaatttttagtt

SEQ ID NO: 32580 - RNA, 21 nt, synthetic construct
  source 1..21: mol_type = other RNA; note = Description of Artificial Sequence: Synthetic oligonucleotide
tttctcttgtaaatttttatt

SEQ ID NO: 32581 - RNA, 21 nt, synthetic construct
  source 1..21: mol_type = other RNA; note = Description of Artificial Sequence: Synthetic oligonucleotide
tcttctcttgtaaattttttt

SEQ ID NO: 32582 - RNA, 21 nt, synthetic construct
  source 1..21: mol_type = other RNA; note = Description of Artificial Sequence: Synthetic oligonucleotide
ttcttctcttgtaaatttttt

SEQ ID NO: 32583 - RNA, 21 nt, synthetic construct
  source 1..21: mol_type = other RNA; note = Description of Artificial Sequence: Synthetic oligonucleotide
tttcttctcttgtaaattttt

SEQ ID NO: 32584 - RNA, 21 nt, synthetic construct
  source 1..21: mol_type = other RNA; note = Description of Artificial Sequence: Synthetic oligonucleotide
ttttcttctcttgtaaatttt

SEQ ID NO: 32585 - RNA, 21 nt, synthetic construct
  source 1..21: mol_type = other RNA; note = Description of Artificial Sequence: Synthetic oligonucleotide
tctttcttctcttgtaaattt

SEQ ID NO: 32586 - RNA, 21 nt, synthetic construct
  source 1..21: mol_type = other RNA; note = Description of Artificial Sequence: Synthetic oligonucleotide
tactttcttctcttgtaaatt

SEQ ID NO: 32587 - RNA, 21 nt, synthetic construct
  source 1..21: mol_type = other RNA; note = Description of Artificial Sequence: Synthetic oligonucleotide
tcactttcttctcttgtaatt

SEQ ID NO: 32588 - RNA, 21 nt, synthetic construct
  source 1..21: mol_type = other RNA; note = Description of Artificial Sequence: Synthetic oligonucleotide
ttcactttcttctcttgtatt

SEQ ID NO: 32589 - RNA, 21 nt, synthetic construct
  source 1..21: mol_type = other RNA; note = Description of Artificial Sequence: Synthetic oligonucleotide
tttcactttcttctcttgttt

SEQ ID NO: 32590 - RNA, 21 nt, synthetic construct
  source 1..21: mol_type = other RNA; note = Description of Artificial Sequence: Synthetic oligonucleotide
ttttcactttcttctcttgtt

SEQ ID NO: 32591 - RNA, 21 nt, synthetic construct
  source 1..21: mol_type = other RNA; note = Description of Artificial Sequence: Synthetic oligonucleotide
tctttcactttcttctctttt

SEQ ID NO: 32592 - RNA, 21 nt, synthetic construct
  source 1..21: mol_type = other RNA; note = Description of Artificial Sequence: Synthetic oligonucleotide
tgctttcactttcttctcttt

SEQ ID NO: 32593 - RNA, 21 nt, synthetic construct
  source 1..21: mol_type = other RNA; note = Description of Artificial Sequence: Synthetic oligonucleotide
ttgctttcactttcttctctt

SEQ ID NO: 32594 - RNA, 21 nt, synthetic construct
  source 1..21: mol_type = other RNA; note = Description of Artificial Sequence: Synthetic oligonucleotide
tttgctttcactttcttcttt

SEQ ID NO: 32595 - RNA, 21 nt, synthetic construct
  source 1..21: mol_type = other RNA; note = Description of Artificial Sequence: Synthetic oligonucleotide
ttttgctttcactttcttctt

SEQ ID NO: 32596 - RNA, 21 nt, synthetic construct
  source 1..21: mol_type = other RNA; note = Description of Artificial Sequence: Synthetic oligonucleotide
tatttgctttcactttctttt

SEQ ID NO: 32597 - RNA, 21 nt, synthetic construct
  source 1..21: mol_type = other RNA; note = Description of Artificial Sequence: Synthetic oligonucleotide
tcatttgctttcactttcttt

SEQ ID NO: 32598 - RNA, 21 nt, synthetic construct
  source 1..21: mol_type = other RNA; note = Description of Artificial Sequence: Synthetic oligonucleotide
tccatttgctttcactttctt

SEQ ID NO: 32599 - RNA, 21 nt, synthetic construct
  source 1..21: mol_type = other RNA; note = Description of Artificial Sequence: Synthetic oligonucleotide
tcccatttgctttcacttttt

SEQ ID NO: 32600 - RNA, 21 nt, synthetic construct
  source 1..21: mol_type = other RNA; note = Description of Artificial Sequence: Synthetic oligonucleotide
tccccatttgctttcactttt

SEQ ID NO: 32601 - RNA, 21 nt, synthetic construct
  source 1..21: mol_type = other RNA; note = Description of Artificial Sequence: Synthetic oligonucleotide
taccccatttgctttcacttt

SEQ ID NO: 32602 - RNA, 21 nt, synthetic construct
  source 1..21: mol_type = other RNA; note = Description of Artificial Sequence: Synthetic oligonucleotide
taaccccatttgctttcactt

SEQ ID NO: 32603 - RNA, 21 nt, synthetic construct
  source 1..21: mol_type = other RNA; note = Description of Artificial Sequence: Synthetic oligonucleotide
taaaccccatttgctttcatt

SEQ ID NO: 32604 - RNA, 21 nt, synthetic construct
  source 1..21: mol_type = other RNA; note = Description of Artificial Sequence: Synthetic oligonucleotide
tgaaaccccatttgctttctt

SEQ ID NO: 32605 - RNA, 21 nt, synthetic construct
  source 1..21: mol_type = other RNA; note = Description of Artificial Sequence: Synthetic oligonucleotide
ttgaaaccccatttgcttttt

SEQ ID NO: 32606 - RNA, 21 nt, synthetic construct
  source 1..21: mol_type = other RNA; note = Description of Artificial Sequence: Synthetic oligonucleotide
tgtgaaaccccatttgctttt

SEQ ID NO: 32607 - RNA, 21 nt, synthetic construct
  source 1..21: mol_type = other RNA; note = Description of Artificial Sequence: Synthetic oligonucleotide
ttgtgaaaccccatttgcttt

SEQ ID NO: 32608 - RNA, 21 nt, synthetic construct
  source 1..21: mol_type = other RNA; note = Description of Artificial Sequence: Synthetic oligonucleotide
tttgtgaaaccccatttgctt

SEQ ID NO: 32609 - RNA, 21 nt, synthetic construct
  source 1..21: mol_type = other RNA; note = Description of Artificial Sequence: Synthetic oligonucleotide
ttttgtgaaaccccatttgtt

SEQ ID NO: 32610 - RNA, 21 nt, synthetic construct
  source 1..21: mol_type = other RNA; note = Description of Artificial Sequence: Synthetic oligonucleotide
tatttgtgaaaccccattttt

SEQ ID NO: 32611 - RNA, 21 nt, synthetic construct
  source 1..21: mol_type = other RNA; note = Description of Artificial Sequence: Synthetic oligonucleotide
ttatttgtgaaaccccatttt

SEQ ID NO: 32612 - RNA, 21 nt, synthetic construct
  source 1..21: mol_type = other RNA; note = Description of Artificial Sequence: Synthetic oligonucleotide
tctatttgtgaaaccccattt

SEQ ID NO: 32613 - RNA, 21 nt, synthetic construct
  source 1..21: mol_type = other RNA; note = Description of Artificial Sequence: Synthetic oligonucleotide
tactatttgtgaaaccccatt

SEQ ID NO: 32614 - RNA, 21 nt, synthetic construct
  source 1..21: mol_type = other RNA; note = Description of Artificial Sequence: Synthetic oligonucleotide
taactatttgtgaaacccctt

SEQ ID NO: 32615 - RNA, 21 nt, synthetic construct
  source 1..21: mol_type = other RNA; note = Description of Artificial Sequence: Synthetic oligonucleotide
tcaactatttgtgaaaccctt

SEQ ID NO: 32616 - RNA, 21 nt, synthetic construct
  source 1..21: mol_type = other RNA; note = Description of Artificial Sequence: Synthetic oligonucleotide
tacaactatttgtgaaacctt

SEQ ID NO: 32617 - RNA, 21 nt, synthetic construct
  source 1..21: mol_type = other RNA; note = Description of Artificial Sequence: Synthetic oligonucleotide
ttacaactatttgtgaaactt

SEQ ID NO: 32618 - RNA, 21 nt, synthetic construct
  source 1..21: mol_type = other RNA; note = Description of Artificial Sequence: Synthetic oligonucleotide
tttacaactatttgtgaaatt

SEQ ID NO: 32619 - RNA, 21 nt, synthetic construct
  source 1..21: mol_type = other RNA; note = Description of Artificial Sequence: Synthetic oligonucleotide
ttttacaactatttgtgaatt

SEQ ID NO: 32620 - RNA, 21 nt, synthetic construct
  source 1..21: mol_type = other RNA; note = Description of Artificial Sequence: Synthetic oligonucleotide
tatttacaactatttgtgatt

SEQ ID NO: 32621 - RNA, 21 nt, synthetic construct
  source 1..21: mol_type = other RNA; note = Description of Artificial Sequence: Synthetic oligonucleotide
ttatttacaactatttgtgtt

SEQ ID NO: 32622 - RNA, 21 nt, synthetic construct
  source 1..21: mol_type = other RNA; note = Description of Artificial Sequence: Synthetic oligonucleotide
tatatttacaactatttgttt

SEQ ID NO: 32623 - RNA, 21 nt, synthetic construct
  source 1..21: mol_type = other RNA; note = Description of Artificial Sequence: Synthetic oligonucleotide
ttatatttacaactatttgtt

SEQ ID NO: 32624 - RNA, 21 nt, synthetic construct
  source 1..21: mol_type = other RNA; note = Description of Artificial Sequence: Synthetic oligonucleotide
tctatatttacaactattttt

SEQ ID NO: 32625 - RNA, 21 nt, synthetic construct
  source 1..21: mol_type = other RNA; note = Description of Artificial Sequence: Synthetic oligonucleotide
tactatatttacaactatttt

SEQ ID NO: 32626 - RNA, 21 nt, synthetic construct
  source 1..21: mol_type = other RNA; note = Description of Artificial Sequence: Synthetic oligonucleotide
tcactatatttacaactattt

SEQ ID NO: 32627 - RNA, 21 nt, synthetic construct
  source 1..21: mol_type = other RNA; note = Description of Artificial Sequence: Synthetic oligonucleotide
ttcactatatttacaactatt

SEQ ID NO: 32628 - RNA, 21 nt, synthetic construct
  source 1..21: mol_type = other RNA; note = Description of Artificial Sequence: Synthetic oligonucleotide
tttcactatatttacaacttt

SEQ ID NO: 32629 - RNA, 21 nt, synthetic construct
  source 1..21: mol_type = other RNA; note = Description of Artificial Sequence: Synthetic oligonucleotide
tcttcactatatttacaactt

SEQ ID NO: 32630 - RNA, 21 nt, synthetic construct
  source 1..21: mol_type = other RNA; note = Description of Artificial Sequence: Synthetic oligonucleotide
tgcttcactatatttacaatt

SEQ ID NO: 32631 - RNA, 21 nt, synthetic construct
  source 1..21: mol_type = other RNA; note = Description of Artificial Sequence: Synthetic oligonucleotide
ttgcttcactatatttacatt

SEQ ID NO: 32632 - RNA, 21 nt, synthetic construct
  source 1..21: mol_type = other RNA; note = Description of Artificial Sequence: Synthetic oligonucleotide
tttgcttcactatatttactt

SEQ ID NO: 32633 - RNA, 21 nt, synthetic construct
  source 1..21: mol_type = other RNA; note = Description of Artificial Sequence: Synthetic oligonucleotide
tattgcttcactatatttatt

SEQ ID NO: 32634 - RNA, 21 nt, synthetic construct
  source 1..21: mol_type = other RNA; note = Description of Artificial Sequence: Synthetic oligonucleotide
taattgcttcactatattttt

SEQ ID NO: 32635 - RNA, 21 nt, synthetic construct
  source 1..21: mol_type = other RNA; note = Description of Artificial Sequence: Synthetic oligonucleotide
taaattgcttcactatatttt

SEQ ID NO: 32636 - RNA, 21 nt, synthetic construct
  source 1..21: mol_type = other RNA; note = Description of Artificial Sequence: Synthetic oligonucleotide
tcaaattgcttcactatattt

SEQ ID NO: 32637 - RNA, 21 nt, synthetic construct
  source 1..21: mol_type = other RNA; note = Description of Artificial Sequence: Synthetic oligonucleotide
ttcaaattgcttcactatatt

SEQ ID NO: 32638 - RNA, 21 nt, synthetic construct
  source 1..21: mol_type = other RNA; note = Description of Artificial Sequence: Synthetic oligonucleotide
tttcaaattgcttcactattt

SEQ ID NO: 32639 - RNA, 21 nt, synthetic construct
  source 1..21: mol_type = other RNA; note = Description of Artificial Sequence: Synthetic oligonucleotide
ttttcaaattgcttcactatt

SEQ ID NO: 32640 - RNA, 21 nt, synthetic construct
  source 1..21: mol_type = other RNA; note = Description of Artificial Sequence: Synthetic oligonucleotide
tatttcaaattgcttcacttt

SEQ ID NO: 32641 - RNA, 21 nt, synthetic construct
  source 1..21: mol_type = other RNA; note = Description of Artificial Sequence: Synthetic oligonucleotide
ttatttcaaattgcttcactt

SEQ ID NO: 32642 - RNA, 21 nt, synthetic construct
  source 1..21: mol_type = other RNA; note = Description of Artificial Sequence: Synthetic oligonucleotide
tttatttcaaattgcttcatt

SEQ ID NO: 32643 - RNA, 21 nt, synthetic construct
  source 1..21: mol_type = other RNA; note = Description of Artificial Sequence: Synthetic oligonucleotide
tattatttcaaattgcttctt

SEQ ID NO: 32644 - RNA, 21 nt, synthetic construct
  source 1..21: mol_type = other RNA; note = Description of Artificial Sequence: Synthetic oligonucleotide
taattatttcaaattgctttt

SEQ ID NO: 32645 - RNA, 21 nt, synthetic construct
  source 1..21: mol_type = other RNA; note = Description of Artificial Sequence: Synthetic oligonucleotide
taaattatttcaaattgcttt

SEQ ID NO: 32646 - RNA, 21 nt, synthetic construct
  source 1..21: mol_type = other RNA; note = Description of Artificial Sequence: Synthetic oligonucleotide
taaaattatttcaaattgctt

SEQ ID NO: 32647 - RNA, 21 nt, synthetic construct
  source 1..21: mol_type = other RNA; note = Description of Artificial Sequence: Synthetic oligonucleotide
tgaaaattatttcaaattgtt

SEQ ID NO: 32648 - RNA, 21 nt, synthetic construct
  source 1..21: mol_type = other RNA; note = Description of Artificial Sequence: Synthetic oligonucleotide
ttgaaaattatttcaaatttt

SEQ ID NO: 32649 - RNA, 21 nt, synthetic construct
  source 1..21: mol_type = other RNA; note = Description of Artificial Sequence: Synthetic oligonucleotide
tttgaaaattatttcaaattt

SEQ ID NO: 32650 - RNA, 21 nt, synthetic construct
  source 1..21: mol_type = other RNA; note = Description of Artificial Sequence: Synthetic oligonucleotide
tcttgaaaattatttcaaatt

SEQ ID NO: 32651 - RNA, 21 nt, synthetic construct
  source 1..21: mol_type = other RNA; note = Description of Artificial Sequence: Synthetic oligonucleotide
tgcttgaaaattatttcaatt

SEQ ID NO: 32652 - RNA, 21 nt, synthetic construct
  source 1..21: mol_type = other RNA; note = Description of Artificial Sequence: Synthetic oligonucleotide
ttgcttgaaaattatttcatt

SEQ ID NO: 32653 - RNA, 21 nt, synthetic construct
  source 1..21: mol_type = other RNA; note = Description of Artificial Sequence: Synthetic oligonucleotide
tttgcttgaaaattatttctt

SEQ ID NO: 32654 - RNA, 21 nt, synthetic construct
  source 1..21: mol_type = other RNA; note = Description of Artificial Sequence: Synthetic oligonucleotide
ttttgcttgaaaattattttt

SEQ ID NO: 32655 - RNA, 21 nt, synthetic construct
  source 1..21: mol_type = other RNA; note = Description of Artificial Sequence: Synthetic oligonucleotide
tctttgcttgaaaattatttt

SEQ ID NO: 32656 - RNA, 21 nt, synthetic construct
  source 1..21: mol_type = other RNA; note = Description of Artificial Sequence: Synthetic oligonucleotide
tactttgcttgaaaattattt

SEQ ID NO: 32657 - RNA, 21 nt, synthetic construct
  source 1..21: mol_type = other RNA; note = Description of Artificial Sequence: Synthetic oligonucleotide
ttactttgcttgaaaattatt

SEQ ID NO: 32658 - RNA, 21 nt, synthetic construct
  source 1..21: mol_type = other RNA; note = Description of Artificial Sequence: Synthetic oligonucleotide
tatactttgcttgaaaatttt

SEQ ID NO: 32659 - RNA, 21 nt, synthetic construct
  source 1..21: mol_type = other RNA; note = Description of Artificial Sequence: Synthetic oligonucleotide
taatactttgcttgaaaattt

SEQ ID NO: 32660 - RNA, 21 nt, synthetic construct
  source 1..21: mol_type = other RNA; note = Description of Artificial Sequence: Synthetic oligonucleotide
tcaatactttgcttgaaaatt

SEQ ID NO: 32661 - RNA, 21 nt, synthetic construct
  source 1..21: mol_type = other RNA; note = Description of Artificial Sequence: Synthetic oligonucleotide
tacaatactttgcttgaaatt

SEQ ID NO: 32662 - RNA, 21 nt, synthetic construct
  source 1..21: mol_type = other RNA; note = Description of Artificial Sequence: Synthetic oligonucleotide
tcacaatactttgcttgaatt

SEQ ID NO: 32663 - RNA, 21 nt, synthetic construct
  source 1..21: mol_type = other RNA; note = Description of Artificial Sequence: Synthetic oligonucleotide
ttcacaatactttgcttgatt

SEQ ID NO: 32664 - RNA, 21 nt, synthetic construct
  source 1..21: mol_type = other RNA; note = Description of Artificial Sequence: Synthetic oligonucleotide
tttcacaatactttgcttgtt

SEQ ID NO: 32665 - RNA, 21 nt, synthetic construct
  source 1..21: mol_type = other RNA; note = Description of Artificial Sequence: Synthetic oligonucleotide
ttttcacaatactttgctttt

SEQ ID NO: 32666 - RNA, 21 nt, synthetic construct
  source 1..21: mol_type = other RNA; note = Description of Artificial Sequence: Synthetic oligonucleotide
tctttcacaatactttgcttt

SEQ ID NO: 32667 - RNA, 21 nt, synthetic construct
  source 1..21: mol_type = other RNA; note = Description of Artificial Sequence: Synthetic oligonucleotide
tactttcacaatactttgctt

SEQ ID NO: 32668 - RNA, 21 nt, synthetic construct
  source 1..21: mol_type = other RNA; note = Description of Artificial Sequence: Synthetic oligonucleotide
ttactttcacaatactttgtt

SEQ ID NO: 32669 - RNA, 21 nt, synthetic construct
  source 1..21: mol_type = other RNA; note = Description of Artificial Sequence: Synthetic oligonucleotide
tatactttcacaatacttttt

SEQ ID NO: 32670 - RNA, 21 nt, synthetic construct
  source 1..21: mol_type = other RNA; note = Description of Artificial Sequence: Synthetic oligonucleotide
taatactttcacaatactttt

SEQ ID NO: 32671 - RNA, 21 nt, synthetic construct
  source 1..21: mol_type = other RNA; note = Description of Artificial Sequence: Synthetic oligonucleotide
tgaatactttcacaatacttt

SEQ ID NO: 32672 - RNA, 21 nt, synthetic construct
  source 1..21: mol_type = other RNA; note = Description of Artificial Sequence: Synthetic oligonucleotide
tagaatactttcacaatactt

SEQ ID NO: 32673 - RNA, 21 nt, synthetic construct
  source 1..21: mol_type = other RNA; note = Description of Artificial Sequence: Synthetic oligonucleotide
ttagaatactttcacaatatt

SEQ ID NO: 32674 - RNA, 21 nt, synthetic construct
  source 1..21: mol_type = other RNA; note = Description of Artificial Sequence: Synthetic oligonucleotide
tttagaatactttcacaattt

SEQ ID NO: 32675 - RNA, 21 nt, synthetic construct
  source 1..21: mol_type = other RNA; note = Description of Artificial Sequence: Synthetic oligonucleotide
tcttagaatactttcacaatt

SEQ ID NO: 32676 - RNA, 21 nt, synthetic construct
  source 1..21: mol_type = other RNA; note = Description of Artificial Sequence: Synthetic oligonucleotide
tgcttagaatactttcacatt

SEQ ID NO: 32677 - RNA, 21 nt, synthetic construct
  source 1..21: mol_type = other RNA; note = Description of Artificial Sequence: Synthetic oligonucleotide
tggcttagaatactttcactt

SEQ ID NO: 32678 - RNA, 21 nt, synthetic construct
  source 1..21: mol_type = other RNA; note = Description of Artificial Sequence: Synthetic oligonucleotide
ttggcttagaatactttcatt

SEQ ID NO: 32679 - RNA, 21 nt, synthetic construct
  source 1..21: mol_type = other RNA; note = Description of Artificial Sequence: Synthetic oligonucleotide
tttggcttagaatactttctt

SEQ ID NO: 32680 - RNA, 21 nt, synthetic construct
  source 1..21: mol_type = other RNA; note = Description of Artificial Sequence: Synthetic oligonucleotide
tcttggcttagaatacttttt

SEQ ID NO: 32681 - RNA, 21 nt, synthetic construct
  source 1..21: mol_type = other RNA; note = Description of Artificial Sequence: Synthetic oligonucleotide
tacttggcttagaatactttt

SEQ ID NO: 32682 - RNA, 21 nt, synthetic construct
  source 1..21: mol_type = other RNA; note = Description of Artificial Sequence: Synthetic oligonucleotide
taacttggcttagaatacttt

SEQ ID NO: 32683 - RNA, 21 nt, synthetic construct
  source 1..21: mol_type = other RNA; note = Description of Artificial Sequence: Synthetic oligonucleotide
taaacttggcttagaatactt

SEQ ID NO: 32684 - RNA, 21 nt, synthetic construct
  source 1..21: mol_type = other RNA; note = Description of Artificial Sequence: Synthetic oligonucleotide
taaaacttggcttagaatatt

SEQ ID NO: 32685 - RNA, 21 nt, synthetic construct
  source 1..21: mol_type = other RNA; note = Description of Artificial Sequence: Synthetic oligonucleotide
ttaaaacttggcttagaattt

SEQ ID NO: 32686 - RNA, 21 nt, synthetic construct
  source 1..21: mol_type = other RNA; note = Description of Artificial Sequence: Synthetic oligonucleotide
tttaaaacttggcttagaatt

SEQ ID NO: 32687 - RNA, 21 nt, synthetic construct
  source 1..21: mol_type = other RNA; note = Description of Artificial Sequence: Synthetic oligonucleotide
ttttaaaacttggcttagatt

SEQ ID NO: 32688 - RNA, 21 nt, synthetic construct
  source 1..21: mol_type = other RNA; note = Description of Artificial Sequence: Synthetic oligonucleotide
tatttaaaacttggcttagtt

SEQ ID NO: 32689 - RNA, 21 nt, synthetic construct
  source 1..21: mol_type = other RNA; note = Description of Artificial Sequence: Synthetic oligonucleotide
ttatttaaaacttggcttatt

SEQ ID NO: 32690 - RNA, 21 nt, synthetic construct
  source 1..21: mol_type = other RNA; note = Description of Artificial Sequence: Synthetic oligonucleotide
tatatttaaaacttggctttt

SEQ ID NO: 32691 - RNA, 21 nt, synthetic construct
  source 1..21: mol_type = other RNA; note = Description of Artificial Sequence: Synthetic oligonucleotide
taatatttaaaacttggcttt

SEQ ID NO: 32692 - RNA, 21 nt, synthetic construct
  source 1..21: mol_type = other RNA; note = Description of Artificial Sequence: Synthetic oligonucleotide
ttaatatttaaaacttggctt

SEQ ID NO: 32693 - RNA, 21 nt, synthetic construct
  source 1..21: mol_type = other RNA; note = Description of Artificial Sequence: Synthetic oligonucleotide
tataatatttaaaacttggtt

SEQ ID NO: 32694 - RNA, 21 nt, synthetic construct
  source 1..21: mol_type = other RNA; note = Description of Artificial Sequence: Synthetic oligonucleotide
tgataatatttaaaacttgtt

SEQ ID NO: 32695 - RNA, 21 nt, synthetic construct
  source 1..21: mol_type = other RNA; note = Description of Artificial Sequence: Synthetic oligonucleotide
tagataatatttaaaactttt

SEQ ID NO: 32696 - RNA, 21 nt, synthetic construct
  source 1..21: mol_type = other RNA; note = Description of Artificial Sequence: Synthetic oligonucleotide
ttagataatatttaaaacttt

SEQ ID NO: 32697 - RNA, 21 nt, synthetic construct
  source 1..21: mol_type = other RNA; note = Description of Artificial Sequence: Synthetic oligonucleotide
tttagataatatttaaaactt

SEQ ID NO: 32698 - RNA, 21 nt, synthetic construct
  source 1..21: mol_type = other RNA; note = Description of Artificial Sequence: Synthetic oligonucleotide
tgttagataatatttaaaatt

SEQ ID NO: 32699 - RNA, 21 nt, synthetic construct
  source 1..21: mol_type = other RNA; note = Description of Artificial Sequence: Synthetic oligonucleotide
ttgttagataatatttaaatt

SEQ ID NO: 32700 - RNA, 21 nt, synthetic construct
  source 1..21: mol_type = other RNA; note = Description of Artificial Sequence: Synthetic oligonucleotide
tctgttagataatatttaatt

SEQ ID NO: 32701 - RNA, 21 nt, synthetic construct
  source 1..21: mol_type = other RNA; note = Description of Artificial Sequence: Synthetic oligonucleotide
ttctgttagataatatttatt

SEQ ID NO: 32702 - RNA, 21 nt, synthetic construct
  source 1..21: mol_type = other RNA; note = Description of Artificial Sequence: Synthetic oligonucleotide
tgtctgttagataatattttt

SEQ ID NO: 32703 - RNA, 21 nt, synthetic construct
  source 1..21: mol_type = other RNA; note = Description of Artificial Sequence: Synthetic oligonucleotide
ttgtctgttagataatatttt

SEQ ID NO: 32704 - RNA, 21 nt, synthetic construct
  source 1..21: mol_type = other RNA; note = Description of Artificial Sequence: Synthetic oligonucleotide
tttgtctgttagataatattt

SEQ ID NO: 32705 - RNA, 21 nt, synthetic construct
  source 1..21: mol_type = other RNA; note = Description of Artificial Sequence: Synthetic oligonucleotide
tcttgtctgttagataatatt

SEQ ID NO: 32706 - RNA, 21 nt, synthetic construct
  source 1..21: mol_type = other RNA; note = Description of Artificial Sequence: Synthetic oligonucleotide
ttcttgtctgttagataattt

SEQ ID NO: 32707 - RNA, 21 nt, synthetic construct
  source 1..21: mol_type = other RNA; note = Description of Artificial Sequence: Synthetic oligonucleotide
tctcttgtctgttagataatt

SEQ ID NO: 32708 - RNA, 21 nt, synthetic construct
  source 1..21: mol_type = other RNA; note = Description of Artificial Sequence: Synthetic oligonucleotide
tactcttgtctgttagatatt

SEQ ID NO: 32709 - RNA, 21 nt, synthetic construct
  source 1..21: mol_type = other RNA; note = Description of Artificial Sequence: Synthetic oligonucleotide
tcactcttgtctgttagattt

SEQ ID NO: 32710 - RNA, 21 nt, synthetic construct
  source 1..21: mol_type = other RNA; note = Description of Artificial Sequence: Synthetic oligonucleotide
tccactcttgtctgttagatt

SEQ ID NO: 32711 - RNA, 21 nt, synthetic construct
  source 1..21: mol_type = other RNA; note = Description of Artificial Sequence: Synthetic oligonucleotide
taccactcttgtctgttagtt

SEQ ID NO: 32712 - RNA, 21 nt, synthetic construct
  source 1..21: mol_type = other RNA; note = Description of Artificial Sequence: Synthetic oligonucleotide
ttaccactcttgtctgttatt

SEQ ID NO: 32713 - RNA, 21 nt, synthetic construct
  source 1..21: mol_type = other RNA; note = Description of Artificial Sequence: Synthetic oligonucleotide
tataccactcttgtctgtttt

SEQ ID NO: 32714 - RNA, 21 nt, synthetic construct
  source 1..21: mol_type = other RNA; note = Description of Artificial Sequence: Synthetic oligonucleotide
ttataccactcttgtctgttt

SEQ ID NO: 32715 - RNA, 21 nt, synthetic construct
  source 1..21: mol_type = other RNA; note = Description of Artificial Sequence: Synthetic oligonucleotide
tatataccactcttgtctgtt

SEQ ID NO: 32716 - RNA, 21 nt, synthetic construct
  source 1..21: mol_type = other RNA; note = Description of Artificial Sequence: Synthetic oligonucleotide
ttatataccactcttgtcttt

SEQ ID NO: 32717 - RNA, 21 nt, synthetic construct
  source 1..21: mol_type = other RNA; note = Description of Artificial Sequence: Synthetic oligonucleotide
tgtatataccactcttgtctt

SEQ ID NO: 32718 - RNA, 21 nt, synthetic construct
  source 1..21: mol_type = other RNA; note = Description of Artificial Sequence: Synthetic oligonucleotide
ttgtatataccactcttgttt

SEQ ID NO: 32719 - RNA, 21 nt, synthetic construct
  source 1..21: mol_type = other RNA; note = Description of Artificial Sequence: Synthetic oligonucleotide
tttgtatataccactcttgtt

SEQ ID NO: 32720 - RNA, 21 nt, synthetic construct
  source 1..21: mol_type = other RNA; note = Description of Artificial Sequence: Synthetic oligonucleotide
tcttgtatataccactctttt

SEQ ID NO: 32721 - RNA, 21 nt, synthetic construct
  source 1..21: mol_type = other RNA; note = Description of Artificial Sequence: Synthetic oligonucleotide
tacttgtatataccactcttt

SEQ ID NO: 32722 - RNA, 21 nt, synthetic construct
  source 1..21: mol_type = other RNA; note = Description of Artificial Sequence: Synthetic oligonucleotide
ttacttgtatataccactctt

SEQ ID NO: 32723 - RNA, 21 nt, synthetic construct
  source 1..21: mol_type = other RNA; note = Description of Artificial Sequence: Synthetic oligonucleotide
tctacttgtatataccacttt

SEQ ID NO: 32724 - RNA, 21 nt, synthetic construct
  source 1..21: mol_type = other RNA; note = Description of Artificial Sequence: Synthetic oligonucleotide
ttctacttgtatataccactt

SEQ ID NO: 32725 - RNA, 21 nt, synthetic construct
  source 1..21: mol_type = other RNA; note = Description of Artificial Sequence: Synthetic oligonucleotide
tatctacttgtatataccatt

SEQ ID NO: 32726 - RNA, 21 nt, synthetic construct
  source 1..21: mol_type = other RNA; note = Description of Artificial Sequence: Synthetic oligonucleotide
tgatctacttgtatatacctt

SEQ ID NO: 32727 - RNA, 21 nt, synthetic construct
  source 1..21: mol_type = other RNA; note = Description of Artificial Sequence: Synthetic oligonucleotide
tggatctacttgtatatactt

SEQ ID NO: 32728 - RNA, 21 nt, synthetic construct
  source 1..21: mol_type = other RNA; note = Description of Artificial Sequence: Synthetic oligonucleotide
taggatctacttgtatatatt

SEQ ID NO: 32729 - RNA, 21 nt, synthetic construct
  source 1..21: mol_type = other RNA; note = Description of Artificial Sequence: Synthetic oligonucleotide
tcaggatctacttgtatattt

SEQ ID NO: 32730 - RNA, 21 nt, synthetic construct
  source 1..21: mol_type = other RNA; note = Description of Artificial Sequence: Synthetic oligonucleotide
ttcaggatctacttgtatatt

SEQ ID NO: 32731 - RNA, 21 nt, synthetic construct
  source 1..21: mol_type = other RNA; note = Description of Artificial Sequence: Synthetic oligonucleotide
tctcaggatctacttgtattt

SEQ ID NO: 32732 - RNA, 21 nt, synthetic construct
  source 1..21: mol_type = other RNA; note = Description of Artificial Sequence: Synthetic oligonucleotide
ttctcaggatctacttgtatt

SEQ ID NO: 32733 - RNA, 21 nt, synthetic construct
  source 1..21: mol_type = other RNA; note = Description of Artificial Sequence: Synthetic oligonucleotide
tttctcaggatctacttgttt

SEQ ID NO: 32734 - RNA, 21 nt, synthetic construct
  source 1..21: mol_type = other RNA; note = Description of Artificial Sequence: Synthetic oligonucleotide
tcttctcaggatctacttgtt

SEQ ID NO: 32735 - RNA, 21 nt, synthetic construct
  source 1..21: mol_type = other RNA; note = Description of Artificial Sequence: Synthetic oligonucleotide
tacttctcaggatctactttt

SEQ ID NO: 32736 - RNA, 21 nt, synthetic construct
  source 1..21: mol_type = other RNA; note = Description of Artificial Sequence: Synthetic oligonucleotide
ttacttctcaggatctacttt

SEQ ID NO: 32737 - RNA, 21 nt, synthetic construct
  source 1..21: mol_type = other RNA; note = Description of Artificial Sequence: Synthetic oligonucleotide
tgtacttctcaggatctactt

SEQ ID NO: 32738 - RNA, 21 nt, synthetic construct
  source 1..21: mol_type = other RNA; note = Description of Artificial Sequence: Synthetic oligonucleotide
tggtacttctcaggatctatt

SEQ ID NO: 32739 - RNA, 21 nt, synthetic construct
  source 1..21: mol_type = other RNA; note = Description of Artificial Sequence: Synthetic oligonucleotide
taggtacttctcaggatcttt

SEQ ID NO: 32740 - RNA, 21 nt, synthetic construct
  source 1..21: mol_type = other RNA; note = Description of Artificial Sequence: Synthetic oligonucleotide
taaggtacttctcaggatctt

SEQ ID NO: 32741 - RNA, 21 nt, synthetic construct
  source 1..21: mol_type = other RNA; note = Description of Artificial Sequence: Synthetic oligonucleotide
taaaggtacttctcaggattt

SEQ ID NO: 32742 - RNA, 21 nt, synthetic construct
  source 1..21: mol_type = other RNA; note = Description of Artificial Sequence: Synthetic oligonucleotide
tcaaaggtacttctcaggatt

SEQ ID NO: 32743 - RNA, 21 nt, synthetic construct
  source 1..21: mol_type = other RNA; note = Description of Artificial Sequence: Synthetic oligonucleotide
tacaaaggtacttctcaggtt

SEQ ID NO: 32744 - RNA, 21 nt, synthetic construct
  source 1..21: mol_type = other RNA; note = Description of Artificial Sequence: Synthetic oligonucleotide
taacaaaggtacttctcagtt

SEQ ID NO: 32745 - RNA, 21 nt, synthetic construct
  source 1..21: mol_type = other RNA; note = Description of Artificial Sequence: Synthetic oligonucleotide
ttaacaaaggtacttctcatt

SEQ ID NO: 32746 - RNA, 21 nt, synthetic construct
  source 1..21: mol_type = other RNA; note = Description of Artificial Sequence: Synthetic oligonucleotide
tgtaacaaaggtacttctctt

SEQ ID NO: 32747 - RNA, 21 nt, synthetic construct
  source 1..21: mol_type = other RNA; note = Description of Artificial Sequence: Synthetic oligonucleotide
ttgtaacaaaggtacttcttt

SEQ ID NO: 32748 - RNA, 21 nt, synthetic construct
  source 1..21: mol_type = other RNA; note = Description of Artificial Sequence: Synthetic oligonucleotide
tctgtaacaaaggtacttctt

SEQ ID NO: 32749 - RNA, 21 nt, synthetic construct
  source 1..21: mol_type = other RNA; note = Description of Artificial Sequence: Synthetic oligonucleotide
tgctgtaacaaaggtactttt

SEQ ID NO: 32750 - RNA, 21 nt, synthetic construct
  source 1..21: mol_type = other RNA; note = Description of Artificial Sequence: Synthetic oligonucleotide
tagctgtaacaaaggtacttt

SEQ ID NO: 32751 - RNA, 21 nt, synthetic construct
  source 1..21: mol_type = other RNA; note = Description of Artificial Sequence: Synthetic oligonucleotide
ttagctgtaacaaaggtactt

SEQ ID NO: 32752 - RNA, 21 nt, synthetic construct
  source 1..21: mol_type = other RNA; note = Description of Artificial Sequence: Synthetic oligonucleotide
tgtagctgtaacaaaggtatt

SEQ ID NO: 32753 - RNA, 21 nt, synthetic construct
  source 1..21: mol_type = other RNA; note = Description of Artificial Sequence: Synthetic oligonucleotide
tagtagctgtaacaaaggttt

SEQ ID NO: 32754 - RNA, 21 nt, synthetic construct
  source 1..21: mol_type = other RNA; note = Description of Artificial Sequence: Synthetic oligonucleotide
ttagtagctgtaacaaaggtt

SEQ ID NO: 32755 - RNA, 21 nt, synthetic construct
  source 1..21: mol_type = other RNA; note = Description of Artificial Sequence: Synthetic oligonucleotide
tatagtagctgtaacaaagtt

SEQ ID NO: 32756 - RNA, 21 nt, synthetic construct
  source 1..21: mol_type = other RNA; note = Description of Artificial Sequence: Synthetic oligonucleotide
ttatagtagctgtaacaaatt

SEQ ID NO: 32757 - RNA, 21 nt, synthetic construct
  source 1..21: mol_type = other RNA; note = Description of Artificial Sequence: Synthetic oligonucleotide
tttatagtagctgtaacaatt

SEQ ID NO: 32758 - RNA, 21 nt, synthetic construct
  source 1..21: mol_type = other RNA; note = Description of Artificial Sequence: Synthetic oligonucleotide
ttttatagtagctgtaacatt

SEQ ID NO: 32759 - RNA, 21 nt, synthetic construct
  source 1..21: mol_type = other RNA; note = Description of Artificial Sequence: Synthetic oligonucleotide
tatttatagtagctgtaactt

SEQ ID NO: 32760 - RNA, 21 nt, synthetic construct
  source 1..21: mol_type = other RNA; note = Description of Artificial Sequence: Synthetic oligonucleotide
ttatttatagtagctgtaatt

SEQ ID NO: 32761 - RNA, 21 nt, synthetic construct
  source 1..21: mol_type = other RNA; note = Description of Artificial Sequence: Synthetic oligonucleotide
tatatttatagtagctgtatt

SEQ ID NO: 32762 - RNA, 21 nt, synthetic construct
  source 1..21: mol_type = other RNA; note = Description of Artificial Sequence: Synthetic oligonucleotide
ttatatttatagtagctgttt

SEQ ID NO: 32763 - RNA, 21 nt, synthetic construct
  source 1..21: mol_type = other RNA; note = Description of Artificial Sequence: Synthetic oligonucleotide
tgtatatttatagtagctgtt

SEQ ID NO: 32764 - RNA, 21 nt, synthetic construct
  source 1..21: mol_type = other RNA; note = Description of Artificial Sequence: Synthetic oligonucleotide
ttgtatatttatagtagcttt

SEQ ID NO: 32765 - RNA, 21 nt, synthetic construct
  source 1..21: mol_type = other RNA; note = Description of Artificial Sequence: Synthetic oligonucleotide
tatgtatatttatagtagctt

SEQ ID NO: 32766 - RNA, 21 nt, synthetic construct
  source 1..21: mol_type = other RNA; note = Description of Artificial Sequence: Synthetic oligonucleotide
ttatgtatatttatagtagtt

SEQ ID NO: 32767 - RNA, 21 nt, synthetic construct
  source 1..21: mol_type = other RNA; note = Description of Artificial Sequence: Synthetic oligonucleotide
tatatgtatatttatagtatt

SEQ ID NO: 32768 - RNA, 21 nt, synthetic construct
  source 1..21: mol_type = other RNA; note = Description of Artificial Sequence: Synthetic oligonucleotide
ttatatgtatatttatagttt

SEQ ID NO: 32769 - RNA, 21 nt, synthetic construct
  source 1..21: mol_type = other RNA; note = Description of Artificial Sequence: Synthetic oligonucleotide
tttatatgtatatttatagtt

SEQ ID NO: 32770 - RNA, 21 nt, synthetic construct
  source 1..21: mol_type = other RNA; note = Description of Artificial Sequence: Synthetic oligonucleotide
ttttatatgtatatttatatt

SEQ ID NO: 32771 - RNA, 21 nt, synthetic construct
  source 1..21: mol_type = other RNA; note = Description of Artificial Sequence: Synthetic oligonucleotide
tatttatatgtatatttattt

SEQ ID NO: 32772 - RNA, 21 nt, synthetic construct
  source 1..21: mol_type = other RNA; note = Description of Artificial Sequence: Synthetic oligonucleotide
taatttatatgtatatttatt

SEQ ID NO: 32773 - RNA, 21 nt, synthetic construct
  source 1..21: mol_type = other RNA; note = Description of Artificial Sequence: Synthetic oligonucleotide
ttaatttatatgtatattttt

SEQ ID NO: 32774 - RNA, 21 nt, synthetic construct
  source 1..21: mol_type = other RNA; note = Description of Artificial Sequence: Synthetic oligonucleotide
tataatttatatgtatatttt

SEQ ID NO: 32775 - RNA, 21 nt, synthetic construct
  source 1..21: mol_type = other RNA; note = Description of Artificial Sequence: Synthetic oligonucleotide
ttataatttatatgtatattt

SEQ ID NO: 32776 - RNA, 21 nt, synthetic construct
  source 1..21: mol_type = other RNA; note = Description of Artificial Sequence: Synthetic oligonucleotide
tctataatttatatgtatatt

SEQ ID NO: 32777 - RNA, 21 nt, synthetic construct
  source 1..21: mol_type = other RNA; note = Description of Artificial Sequence: Synthetic oligonucleotide
ttctataatttatatgtattt

SEQ ID NO: 32778 - RNA, 21 nt, synthetic construct
  source 1..21: mol_type = other RNA; note = Description of Artificial Sequence: Synthetic oligonucleotide
tttctataatttatatgtatt

SEQ ID NO: 32779 - RNA, 21 nt, synthetic construct
  source 1..21: mol_type = other RNA; note = Description of Artificial Sequence: Synthetic oligonucleotide
tattctataatttatatgttt

SEQ ID NO: 32780 - RNA, 21 nt, synthetic construct
  source 1..21: mol_type = other RNA; note = Description of Artificial Sequence: Synthetic oligonucleotide
tgattctataatttatatgtt

SEQ ID NO: 32781 - RNA, 21 nt, synthetic construct
  source 1..21: mol_type = other RNA; note = Description of Artificial Sequence: Synthetic oligonucleotide
tagattctataatttatattt

SEQ ID NO: 32782 - RNA, 21 nt, synthetic construct
  source 1..21: mol_type = other RNA; note = Description of Artificial Sequence: Synthetic oligonucleotide
ttagattctataatttatatt

SEQ ID NO: 32783 - RNA, 21 nt, synthetic construct
  source 1..21: mol_type = other RNA; note = Description of Artificial Sequence: Synthetic oligonucleotide
tgtagattctataatttattt

SEQ ID NO: 32784 - RNA, 21 nt, synthetic construct
  source 1..21: mol_type = other RNA; note = Description of Artificial Sequence: Synthetic oligonucleotide
tagtagattctataatttatt

SEQ ID NO: 32785 - RNA, 21 nt, synthetic construct
  source 1..21: mol_type = other RNA; note = Description of Artificial Sequence: Synthetic oligonucleotide
taagtagattctataattttt

SEQ ID NO: 32786 - RNA, 21 nt, synthetic construct
  source 1..21: mol_type = other RNA; note = Description of Artificial Sequence: Synthetic oligonucleotide
taaagtagattctataatttt

SEQ ID NO: 32787 - RNA, 21 nt, synthetic construct
  source 1..21: mol_type = other RNA; note = Description of Artificial Sequence: Synthetic oligonucleotide
ttaaagtagattctataattt

SEQ ID NO: 32788 - RNA, 21 nt, synthetic construct
  source 1..21: mol_type = other RNA; note = Description of Artificial Sequence: Synthetic oligonucleotide
tttaaagtagattctataatt

SEQ ID NO: 32789 - RNA, 21 nt, synthetic construct
  source 1..21: mol_type = other RNA; note = Description of Artificial Sequence: Synthetic oligonucleotide
tattaaagtagattctatatt

SEQ ID NO: 32790 - RNA, 21 nt, synthetic construct
  source 1..21: mol_type = other RNA; note = Description of Artificial Sequence: Synthetic oligonucleotide
taattaaagtagattctattt

SEQ ID NO: 32791 - RNA, 21 nt, synthetic construct
  source 1..21: mol_type = other RNA; note = Description of Artificial Sequence: Synthetic oligonucleotide
taaattaaagtagattctatt

SEQ ID NO: 32792 - RNA, 21 nt, synthetic construct
  source 1..21: mol_type = other RNA; note = Description of Artificial Sequence: Synthetic oligonucleotide
ttaaattaaagtagattcttt

SEQ ID NO: 32793 - RNA, 21 nt, synthetic construct
  source 1..21: mol_type = other RNA; note = Description of Artificial Sequence: Synthetic oligonucleotide
tataaattaaagtagattctt

SEQ ID NO: 32794 - RNA, 21 nt, synthetic construct
  source 1..21: mol_type = other RNA; note = Description of Artificial Sequence: Synthetic oligonucleotide
taataaattaaagtagatttt

SEQ ID NO: 32795 - RNA, 21 nt, synthetic construct
  source 1..21: mol_type = other RNA; note = Description of Artificial Sequence: Synthetic oligonucleotide
taaataaattaaagtagattt

SEQ ID NO: 32796 - RNA, 21 nt, synthetic construct
  source 1..21: mol_type = other RNA; note = Description of Artificial Sequence: Synthetic oligonucleotide
taaaataaattaaagtagatt

SEQ ID NO: 32797 - RNA, 21 nt, synthetic construct
  source 1..21: mol_type = other RNA; note = Description of Artificial Sequence: Synthetic oligonucleotide
tcaaaataaattaaagtagtt

SEQ ID NO: 32798 - RNA, 21 nt, synthetic construct
  source 1..21: mol_type = other RNA; note = Description of Artificial Sequence: Synthetic oligonucleotide
tacaaaataaattaaagtatt

SEQ ID NO: 32799 - RNA, 21 nt, synthetic construct
  source 1..21: mol_type = other RNA; note = Description of Artificial Sequence: Synthetic oligonucleotide
tcacaaaataaattaaagttt

SEQ ID NO: 32800 - RNA, 21 nt, synthetic construct
  source 1..21: mol_type = other RNA; note = Description of Artificial Sequence: Synthetic oligonucleotide
ttcacaaaataaattaaagtt

SEQ ID NO: 32801 - RNA, 21 nt, synthetic construct
  source 1..21: mol_type = other RNA; note = Description of Artificial Sequence: Synthetic oligonucleotide
tttcacaaaataaattaaatt

SEQ ID NO: 32802 - RNA, 21 nt, synthetic construct
  source 1..21: mol_type = other RNA; note = Description of Artificial Sequence: Synthetic oligonucleotide
tgttcacaaaataaattaatt

SEQ ID NO: 32803 - RNA, 21 nt, synthetic construct
  source 1..21: mol_type = other RNA; note = Description of Artificial Sequence: Synthetic oligonucleotide
ttgttcacaaaataaattatt

SEQ ID NO: 32804 - RNA, 21 nt, synthetic construct
  source 1..21: mol_type = other RNA; note = Description of Artificial Sequence: Synthetic oligonucleotide
tgtgttcacaaaataaatttt

SEQ ID NO: 32805 - RNA, 21 nt, synthetic construct
  source 1..21: mol_type = other RNA; note = Description of Artificial Sequence: Synthetic oligonucleotide
tagtgttcacaaaataaattt

SEQ ID NO: 32806 - RNA, 21 nt, synthetic construct
  source 1..21: mol_type = other RNA; note = Description of Artificial Sequence: Synthetic oligonucleotide
taagtgttcacaaaataaatt

SEQ ID NO: 32807 - RNA, 21 nt, synthetic construct
  source 1..21: mol_type = other RNA; note = Description of Artificial Sequence: Synthetic oligonucleotide
taaagtgttcacaaaataatt

SEQ ID NO: 32808 - RNA, 21 nt, synthetic construct
  source 1..21: mol_type = other RNA; note = Description of Artificial Sequence: Synthetic oligonucleotide
taaaagtgttcacaaaatatt

SEQ ID NO: 32809 - RNA, 21 nt, synthetic construct
  source 1..21: mol_type = other RNA; note = Description of Artificial Sequence: Synthetic oligonucleotide
tcaaaagtgttcacaaaattt

SEQ ID NO: 32810 - RNA, 21 nt, synthetic construct
  source 1..21: mol_type = other RNA; note = Description of Artificial Sequence: Synthetic oligonucleotide
ttcaaaagtgttcacaaaatt

SEQ ID NO: 32811 - RNA, 21 nt, synthetic construct
  source 1..21: mol_type = other RNA; note = Description of Artificial Sequence: Synthetic oligonucleotide
tttcaaaagtgttcacaaatt

SEQ ID NO: 32812 - RNA, 21 nt, synthetic construct
  source 1..21: mol_type = other RNA; note = Description of Artificial Sequence: Synthetic oligonucleotide
ttttcaaaagtgttcacaatt

SEQ ID NO: 32813 - RNA, 21 nt, synthetic construct
  source 1..21: mol_type = other RNA; note = Description of Artificial Sequence: Synthetic oligonucleotide
tttttcaaaagtgttcacatt

SEQ ID NO: 32814 - RNA, 21 nt, synthetic construct
  source 1..21: mol_type = other RNA; note = Description of Artificial Sequence: Synthetic oligonucleotide
tattttcaaaagtgttcactt

SEQ ID NO: 32815 - RNA, 21 nt, synthetic construct
  source 1..21: mol_type = other RNA; note = Description of Artificial Sequence: Synthetic oligonucleotide
tcattttcaaaagtgttcatt

SEQ ID NO: 32816 - RNA, 21 nt, synthetic construct
  source 1..21: mol_type = other RNA; note = Description of Artificial Sequence: Synthetic oligonucleotide
tacattttcaaaagtgttctt

SEQ ID NO: 32817 - RNA, 21 nt, synthetic construct
  source 1..21: mol_type = other RNA; note = Description of Artificial Sequence: Synthetic oligonucleotide
ttacattttcaaaagtgtttt

SEQ ID NO: 32818 - RNA, 21 nt, synthetic construct
  source 1..21: mol_type = other RNA; note = Description of Artificial Sequence: Synthetic oligonucleotide
tgtacattttcaaaagtgttt

SEQ ID NO: 32819 - RNA, 21 nt, synthetic construct
  source 1..21: mol_type = other RNA; note = Description of Artificial Sequence: Synthetic oligonucleotide
ttgtacattttcaaaagtgtt

SEQ ID NO: 32820 - RNA, 21 nt, synthetic construct
  source 1..21: mol_type = other RNA; note = Description of Artificial Sequence: Synthetic oligonucleotide
tatgtacattttcaaaagttt

SEQ ID NO: 32821 - RNA, 21 nt, synthetic construct
  source 1..21: mol_type = other RNA; note = Description of Artificial Sequence: Synthetic oligonucleotide
tcatgtacattttcaaaagtt

SEQ ID NO: 32822 - RNA, 21 nt, synthetic construct
  source 1..21: mol_type = other RNA; note = Description of Artificial Sequence: Synthetic oligonucleotide
tacatgtacattttcaaaatt

SEQ ID NO: 32823 - RNA, 21 nt, synthetic construct
  source 1..21: mol_type = other RNA; note = Description of Artificial Sequence: Synthetic oligonucleotide
taacatgtacattttcaaatt

SEQ ID NO: 32824 - RNA, 21 nt, synthetic construct
  source 1..21: mol_type = other RNA; note = Description of Artificial Sequence: Synthetic oligonucleotide
tgaacatgtacattttcaatt

SEQ ID NO: 32825 - RNA, 21 nt, synthetic construct
  source 1..21: mol_type = other RNA; note = Description of Artificial Sequence: Synthetic oligonucleotide
tggaacatgtacattttcatt

SEQ ID NO: 32826 - RNA, 21 nt, synthetic construct
  source 1..21: mol_type = other RNA; note = Description of Artificial Sequence: Synthetic oligonucleotide
taggaacatgtacattttctt

SEQ ID NO: 32827 - RNA, 21 nt, synthetic construct
  source 1..21: mol_type = other RNA; note = Description of Artificial Sequence: Synthetic oligonucleotide
taaggaacatgtacatttttt

SEQ ID NO: 32828 - RNA, 21 nt, synthetic construct
  source 1..21: mol_type = other RNA; note = Description of Artificial Sequence: Synthetic oligonucleotide
taaaggaacatgtacattttt

SEQ ID NO: 32829 - RNA, 21 nt, synthetic construct
  source 1..21: mol_type = other RNA; note = Description of Artificial Sequence: Synthetic oligonucleotide
tcaaaggaacatgtacatttt

SEQ ID NO: 32830 - RNA, 21 nt, synthetic construct
  source 1..21: mol_type = other RNA; note = Description of Artificial Sequence: Synthetic oligonucleotide
tacaaaggaacatgtacattt

SEQ ID NO: 32831 - RNA, 21 nt, synthetic construct
  source 1..21: mol_type = other RNA; note = Description of Artificial Sequence: Synthetic oligonucleotide
ttacaaaggaacatgtacatt

SEQ ID NO: 32832 - RNA, 21 nt, synthetic construct
  source 1..21: mol_type = other RNA; note = Description of Artificial Sequence: Synthetic oligonucleotide
tttacaaaggaacatgtactt

SEQ ID NO: 32833 - RNA, 21 nt, synthetic construct
  source 1..21: mol_type = other RNA; note = Description of Artificial Sequence: Synthetic oligonucleotide
tattacaaaggaacatgtatt

SEQ ID NO: 32834 - RNA, 21 nt, synthetic construct
  source 1..21: mol_type = other RNA; note = Description of Artificial Sequence: Synthetic oligonucleotide
taattacaaaggaacatgttt

SEQ ID NO: 32835 - RNA, 21 nt, synthetic construct
  source 1..21: mol_type = other RNA; note = Description of Artificial Sequence: Synthetic oligonucleotide
tcaattacaaaggaacatgtt

SEQ ID NO: 32836 - RNA, 21 nt, synthetic construct
  source 1..21: mol_type = other RNA; note = Description of Artificial Sequence: Synthetic oligonucleotide
ttcaattacaaaggaacattt

SEQ ID NO: 32837 - RNA, 21 nt, synthetic construct
  source 1..21: mol_type = other RNA; note = Description of Artificial Sequence: Synthetic oligonucleotide
tgtcaattacaaaggaacatt

SEQ ID NO: 32838 - RNA, 21 nt, synthetic construct
  source 1..21: mol_type = other RNA; note = Description of Artificial Sequence: Synthetic oligonucleotide
ttgtcaattacaaaggaactt

SEQ ID NO: 32839 - RNA, 21 nt, synthetic construct
  source 1..21: mol_type = other RNA; note = Description of Artificial Sequence: Synthetic oligonucleotide
tgtgtcaattacaaaggaatt

SEQ ID NO: 32840 - RNA, 21 nt, synthetic construct
  source 1..21: mol_type = other RNA; note = Description of Artificial Sequence: Synthetic oligonucleotide
tagtgtcaattacaaaggatt

SEQ ID NO: 32841 - RNA, 21 nt, synthetic construct
  source 1..21: mol_type = other RNA; note = Description of Artificial Sequence: Synthetic oligonucleotide
ttagtgtcaattacaaaggtt

SEQ ID NO: 32842 - RNA, 21 nt, synthetic construct
  source 1..21: mol_type = other RNA; note = Description of Artificial Sequence: Synthetic oligonucleotide
tatagtgtcaattacaaagtt

SEQ ID NO: 32843 - RNA, 21 nt, synthetic construct
  source 1..21: mol_type = other RNA; note = Description of Artificial Sequence: Synthetic oligonucleotide
ttatagtgtcaattacaaatt

SEQ ID NO: 32844 - RNA, 21 nt, synthetic construct
  source 1..21: mol_type = other RNA; note = Description of Artificial Sequence: Synthetic oligonucleotide
tatatagtgtcaattacaatt

SEQ ID NO: 32845 - RNA, 21 nt, synthetic construct
  source 1..21: mol_type = other RNA; note = Description of Artificial Sequence: Synthetic oligonucleotide
ttatatagtgtcaattacatt

SEQ ID NO: 32846 - RNA, 21 nt, synthetic construct
  source 1..21: mol_type = other RNA; note = Description of Artificial Sequence: Synthetic oligonucleotide
tatatatagtgtcaattactt

SEQ ID NO: 32847 - RNA, 21 nt, synthetic construct
  source 1..21: mol_type = other RNA; note = Description of Artificial Sequence: Synthetic oligonucleotide
taatatatagtgtcaattatt

SEQ ID NO: 32848 - RNA, 21 nt, synthetic construct
  source 1..21: mol_type = other RNA; note = Description of Artificial Sequence: Synthetic oligonucleotide
taaatatatagtgtcaatttt

SEQ ID NO: 32849 - RNA, 21 nt, synthetic construct
  source 1..21: mol_type = other RNA; note = Description of Artificial Sequence: Synthetic oligonucleotide
tgaaatatatagtgtcaattt

SEQ ID NO: 32850 - RNA, 21 nt, synthetic construct
  source 1..21: mol_type = other RNA; note = Description of Artificial Sequence: Synthetic oligonucleotide
tagaaatatatagtgtcaatt

SEQ ID NO: 32851 - RNA, 21 nt, synthetic construct
  source 1..21: mol_type = other RNA; note = Description of Artificial Sequence: Synthetic oligonucleotide
taagaaatatatagtgtcatt

SEQ ID NO: 32852 - RNA, 21 nt, synthetic construct
  source 1..21: mol_type = other RNA; note = Description of Artificial Sequence: Synthetic oligonucleotide
ttaagaaatatatagtgtctt

SEQ ID NO: 32853 - RNA, 21 nt, synthetic construct
  source 1..21: mol_type = other RNA; note = Description of Artificial Sequence: Synthetic oligonucleotide
tttaagaaatatatagtgttt

SEQ ID NO: 32854 - RNA, 21 nt, synthetic construct
  source 1..21: mol_type = other RNA; note = Description of Artificial Sequence: Synthetic oligonucleotide
tattaagaaatatatagtgtt

SEQ ID NO: 32855 - RNA, 21 nt, synthetic construct
  source 1..21: mol_type = other RNA; note = Description of Artificial Sequence: Synthetic oligonucleotide
ttattaagaaatatatagttt

SEQ ID NO: 32856 - RNA, 21 nt, synthetic construct
  source 1..21: mol_type = other RNA; note = Description of Artificial Sequence: Synthetic oligonucleotide
tttattaagaaatatatagtt

SEQ ID NO: 32857 - RNA, 21 nt, synthetic construct
  source 1..21: mol_type = other RNA; note = Description of Artificial Sequence: Synthetic oligonucleotide
ttttattaagaaatatatatt

SEQ ID NO: 32858 - RNA, 21 nt, synthetic construct
  source 1..21: mol_type = other RNA; note = Description of Artificial Sequence: Synthetic oligonucleotide
tttttattaagaaatatattt

SEQ ID NO: 32859 - RNA, 21 nt, synthetic construct
  source 1..21: mol_type = other RNA; note = Description of Artificial Sequence: Synthetic oligonucleotide
tattttattaagaaatatatt

SEQ ID NO: 32860 - RNA, 21 nt, synthetic construct
  source 1..21: mol_type = other RNA; note = Description of Artificial Sequence: Synthetic oligonucleotide
ttattttattaagaaatattt

SEQ ID NO: 32861 - RNA, 21 nt, synthetic construct
  source 1..21: mol_type = other RNA; note = Description of Artificial Sequence: Synthetic oligonucleotide
tttattttattaagaaatatt

SEQ ID NO: 32862 - RNA, 21 nt, synthetic construct
  source 1..21: mol_type = other RNA; note = Description of Artificial Sequence: Synthetic oligonucleotide
tattattttattaagaaattt

SEQ ID NO: 32863 - RNA, 21 nt, synthetic construct
  source 1..21: mol_type = other RNA; note = Description of Artificial Sequence: Synthetic oligonucleotide
taattattttattaagaaatt

SEQ ID NO: 32864 - RNA, 21 nt, synthetic construct
  source 1..21: mol_type = other RNA; note = Description of Artificial Sequence: Synthetic oligonucleotide
tgaattattttattaagaatt

SEQ ID NO: 32865 - RNA, 21 nt, synthetic construct
  source 1..21: mol_type = other RNA; note = Description of Artificial Sequence: Synthetic oligonucleotide
tagaattattttattaagatt

SEQ ID NO: 32866 - RNA, 21 nt, synthetic construct
  source 1..21: mol_type = other RNA; note = Description of Artificial Sequence: Synthetic oligonucleotide
tgagaattattttattaagtt

SEQ ID NO: 32867 - RNA, 21 nt, synthetic construct
  source 1..21: mol_type = other RNA; note = Description of Artificial Sequence: Synthetic oligonucleotide
ttgagaattattttattaatt

SEQ ID NO: 32868 - RNA, 21 nt, synthetic construct
  source 1..21: mol_type = other RNA; note = Description of Artificial Sequence: Synthetic oligonucleotide
tttgagaattattttattatt

SEQ ID NO: 32869 - RNA, 21 nt, synthetic construct
  source 1..21: mol_type = other RNA; note = Description of Artificial Sequence: Synthetic oligonucleotide
ttttgagaattattttatttt

SEQ ID NO: 32870 - RNA, 21 nt, synthetic construct
  source 1..21: mol_type = other RNA; note = Description of Artificial Sequence: Synthetic oligonucleotide
tatttgagaattattttattt

SEQ ID NO: 32871 - RNA, 21 nt, synthetic construct
  source 1..21: mol_type = other RNA; note = Description of Artificial Sequence: Synthetic oligonucleotide
taatttgagaattattttatt

SEQ ID NO: 32872 - RNA, 21 nt, synthetic construct
  source 1..21: mol_type = other RNA; note = Description of Artificial Sequence: Synthetic oligonucleotide
taaatttgagaattatttttt

SEQ ID NO: 32873 - RNA, 21 nt, synthetic construct
  source 1..21: mol_type = other RNA; note = Description of Artificial Sequence: Synthetic oligonucleotide
tcaaatttgagaattattttt

SEQ ID NO: 32874 - RNA, 21 nt, synthetic construct
  source 1..21: mol_type = other RNA; note = Description of Artificial Sequence: Synthetic oligonucleotide
tacaaatttgagaattatttt

SEQ ID NO: 32875 - RNA, 21 nt, synthetic construct
  source 1..21: mol_type = other RNA; note = Description of Artificial Sequence: Synthetic oligonucleotide
taacaaatttgagaattattt

SEQ ID NO: 32876 - RNA, 21 nt, synthetic construct
  source 1..21: mol_type = other RNA; note = Description of Artificial Sequence: Synthetic oligonucleotide
taaacaaatttgagaattatt

SEQ ID NO: 32877 - RNA, 21 nt, synthetic construct
  source 1..21: mol_type = other RNA; note = Description of Artificial Sequence: Synthetic oligonucleotide
tgaaacaaatttgagaatttt

SEQ ID NO: 32878 - RNA, 21 nt, synthetic construct
  source 1..21: mol_type = other RNA; note = Description of Artificial Sequence: Synthetic oligonucleotide
tagaaacaaatttgagaattt

SEQ ID NO: 32879 - RNA, 21 nt, synthetic construct
  source 1..21: mol_type = other RNA; note = Description of Artificial Sequence: Synthetic oligonucleotide
taagaaacaaatttgagaatt

SEQ ID NO: 32880 - RNA, 21 nt, synthetic construct
  source 1..21: mol_type = other RNA; note = Description of Artificial Sequence: Synthetic oligonucleotide
ttaagaaacaaatttgagatt

SEQ ID NO: 32881 - RNA, 21 nt, synthetic construct
  source 1..21: mol_type = other RNA; note = Description of Artificial Sequence: Synthetic oligonucleotide
tataagaaacaaatttgagtt

SEQ ID NO: 32882 - RNA, 21 nt, synthetic construct
  source 1..21: mol_type = other RNA; note = Description of Artificial Sequence: Synthetic oligonucleotide
tcataagaaacaaatttgatt

SEQ ID NO: 32883 - RNA, 21 nt, synthetic construct
  source 1..21: mol_type = other RNA; note = Description of Artificial Sequence: Synthetic oligonucleotide
ttcataagaaacaaatttgtt

SEQ ID NO: 32884 - RNA, 21 nt, synthetic construct
  source 1..21: mol_type = other RNA; note = Description of Artificial Sequence: Synthetic oligonucleotide
tttcataagaaacaaattttt

SEQ ID NO: 32885 - RNA, 21 nt, synthetic construct
  source 1..21: mol_type = other RNA; note = Description of Artificial Sequence: Synthetic oligonucleotide
tattcataagaaacaaatttt

SEQ ID NO: 32886 - RNA, 21 nt, synthetic construct
  source 1..21: mol_type = other RNA; note = Description of Artificial Sequence: Synthetic oligonucleotide
tgattcataagaaacaaattt

SEQ ID NO: 32887 - RNA, 21 nt, synthetic construct
  source 1..21: mol_type = other RNA; note = Description of Artificial Sequence: Synthetic oligonucleotide
ttgattcataagaaacaaatt

SEQ ID NO: 32888 - RNA, 21 nt, synthetic construct
  source 1..21: mol_type = other RNA; note = Description of Artificial Sequence: Synthetic oligonucleotide
tatgattcataagaaacaatt

SEQ ID NO: 32889 - RNA, 21 nt, synthetic construct
  source 1..21: mol_type = other RNA; note = Description of Artificial Sequence: Synthetic oligonucleotide
tgatgattcataagaaacatt

SEQ ID NO: 32890 - RNA, 21 nt, synthetic construct
  source 1..21: mol_type = other RNA; note = Description of Artificial Sequence: Synthetic oligonucleotide
tagatgattcataagaaactt

SEQ ID NO: 32891 - RNA, 21 nt, synthetic construct
  source 1..21: mol_type = other RNA; note = Description of Artificial Sequence: Synthetic oligonucleotide
tgagatgattcataagaaatt

SEQ ID NO: 32892 - RNA, 21 nt, synthetic construct
  source 1..21: mol_type = other RNA; note = Description of Artificial Sequence: Synthetic oligonucleotide
tagagatgattcataagaatt

SEQ ID NO: 32893 - RNA, 21 nt, synthetic construct
  source 1..21: mol_type = other RNA; note = Description of Artificial Sequence: Synthetic oligonucleotide
tgagagatgattcataagatt

SEQ ID NO: 32894 - RNA, 21 nt, synthetic construct
  source 1..21: mol_type = other RNA; note = Description of Artificial Sequence: Synthetic oligonucleotide
ttgagagatgattcataagtt

SEQ ID NO: 32895 - RNA, 21 nt, synthetic construct
  source 1..21: mol_type = other RNA; note = Description of Artificial Sequence: Synthetic oligonucleotide
tttgagagatgattcataatt

SEQ ID NO: 32896 - RNA, 21 nt, synthetic construct
  source 1..21: mol_type = other RNA; note = Description of Artificial Sequence: Synthetic oligonucleotide
ttttgagagatgattcatatt

SEQ ID NO: 32897 - RNA, 21 nt, synthetic construct
  source 1..21: mol_type = other RNA; note = Description of Artificial Sequence: Synthetic oligonucleotide
tatttgagagatgattcattt

SEQ ID NO: 32898 - RNA, 21 nt, synthetic construct
  source 1..21: mol_type = other RNA; note = Description of Artificial Sequence: Synthetic oligonucleotide
tgatttgagagatgattcatt

SEQ ID NO: 32899 - RNA, 21 nt, synthetic construct
  source 1..21: mol_type = other RNA; note = Description of Artificial Sequence: Synthetic oligonucleotide
tagatttgagagatgattctt

SEQ ID NO: 32900 - RNA, 21 nt, synthetic construct
  source 1..21: mol_type = other RNA; note = Description of Artificial Sequence: Synthetic oligonucleotide
ttagatttgagagatgatttt

SEQ ID NO: 32901 - RNA, 21 nt, synthetic construct
  source 1..21: mol_type = other RNA; note = Description of Artificial Sequence: Synthetic oligonucleotide
tctagatttgagagatgattt

SEQ ID NO: 32902 - RNA, 21 nt, synthetic construct
  source 1..21: mol_type = other RNA; note = Description of Artificial Sequence: Synthetic oligonucleotide
tactagatttgagagatgatt

SEQ ID NO: 32903 - RNA, 21 nt, synthetic construct
  source 1..21: mol_type = other RNA; note = Description of Artificial Sequence: Synthetic oligonucleotide
taactagatttgagagatgtt

SEQ ID NO: 32904 - RNA, 21 nt, synthetic construct
  source 1..21: mol_type = other RNA; note = Description of Artificial Sequence: Synthetic oligonucleotide
ttaactagatttgagagattt

SEQ ID NO: 32905 - RNA, 21 nt, synthetic construct
  source 1..21: mol_type = other RNA; note = Description of Artificial Sequence: Synthetic oligonucleotide
tctaactagatttgagagatt

SEQ ID NO: 32906 - RNA, 21 nt, synthetic construct
  source 1..21: mol_type = other RNA; note = Description of Artificial Sequence: Synthetic oligonucleotide
ttctaactagatttgagagtt

SEQ ID NO: 32907 - RNA, 21 nt, synthetic construct
  source 1..21: mol_type = other RNA; note = Description of Artificial Sequence: Synthetic oligonucleotide
tgtctaactagatttgagatt

SEQ ID NO: 32908 - RNA, 21 nt, synthetic construct
  source 1..21: mol_type = other RNA; note = Description of Artificial Sequence: Synthetic oligonucleotide
ttgtctaactagatttgagtt

SEQ ID NO: 32909 - RNA, 21 nt, synthetic construct
  source 1..21: mol_type = other RNA; note = Description of Artificial Sequence: Synthetic oligonucleotide
tttgtctaactagatttgatt

SEQ ID NO: 32910 - RNA, 21 nt, synthetic construct
  source 1..21: mol_type = other RNA; note = Description of Artificial Sequence: Synthetic oligonucleotide
tattgtctaactagatttgtt

SEQ ID NO: 32911 - RNA, 21 nt, synthetic construct
  source 1..21: mol_type = other RNA; note = Description of Artificial Sequence: Synthetic oligonucleotide
taattgtctaactagattttt

SEQ ID NO: 32912 - RNA, 21 nt, synthetic construct
  source 1..21: mol_type = other RNA; note = Description of Artificial Sequence: Synthetic oligonucleotide
taaattgtctaactagatttt

SEQ ID NO: 32913 - RNA, 21 nt, synthetic construct
  source 1..21: mol_type = other RNA; note = Description of Artificial Sequence: Synthetic oligonucleotide
tcaaattgtctaactagattt

SEQ ID NO: 32914 - RNA, 21 nt, synthetic construct
  source 1..21: mol_type = other RNA; note = Description of Artificial Sequence: Synthetic oligonucleotide
tgcaaattgtctaactagatt

SEQ ID NO: 32915 - RNA, 21 nt, synthetic construct
  source 1..21: mol_type = other RNA; note = Description of Artificial Sequence: Synthetic oligonucleotide
ttgcaaattgtctaactagtt

SEQ ID NO: 32916 - RNA, 21 nt, synthetic construct
  source 1..21: mol_type = other RNA; note = Description of Artificial Sequence: Synthetic oligonucleotide
tgtgcaaattgtctaactatt

SEQ ID NO: 32917 - RNA, 21 nt, synthetic construct
  source 1..21: mol_type = other RNA; note = Description of Artificial Sequence: Synthetic oligonucleotide
ttgtgcaaattgtctaacttt

SEQ ID NO: 32918 - RNA, 21 nt, synthetic construct
  source 1..21: mol_type = other RNA; note = Description of Artificial Sequence: Synthetic oligonucleotide
tgtgtgcaaattgtctaactt

SEQ ID NO: 32919 - RNA, 21 nt, synthetic construct
  source 1..21: mol_type = other RNA; note = Description of Artificial Sequence: Synthetic oligonucleotide
ttgtgtgcaaattgtctaatt

SEQ ID NO: 32920 - RNA, 21 nt, synthetic construct
  source 1..21: mol_type = other RNA; note = Description of Artificial Sequence: Synthetic oligonucleotide
tatgtgtgcaaattgtctatt

SEQ ID NO: 32921 - RNA, 21 nt, synthetic construct
  source 1..21: mol_type = other RNA; note = Description of Artificial Sequence: Synthetic oligonucleotide
ttatgtgtgcaaattgtcttt

SEQ ID NO: 32922 - RNA, 21 nt, synthetic construct
  source 1..21: mol_type = other RNA; note = Description of Artificial Sequence: Synthetic oligonucleotide
tgtatgtgtgcaaattgtctt

SEQ ID NO: 32923 - RNA, 21 nt, synthetic construct
  source 1..21: mol_type = other RNA; note = Description of Artificial Sequence: Synthetic oligonucleotide
tagtatgtgtgcaaattgttt

SEQ ID NO: 32924 - RNA, 21 nt, synthetic construct
  source 1..21: mol_type = other RNA; note = Description of Artificial Sequence: Synthetic oligonucleotide
taagtatgtgtgcaaattgtt

SEQ ID NO: 32925 - RNA, 21 nt, synthetic construct
  source 1..21: mol_type = other RNA; note = Description of Artificial Sequence: Synthetic oligonucleotide
taaagtatgtgtgcaaatttt

SEQ ID NO: 32926 - RNA, 21 nt, synthetic construct
  source 1..21: mol_type = other RNA; note = Description of Artificial Sequence: Synthetic oligonucleotide
taaaagtatgtgtgcaaattt

SEQ ID NO: 32927 - RNA, 21 nt, synthetic construct
  source 1..21: mol_type = other RNA; note = Description of Artificial Sequence: Synthetic oligonucleotide
tgaaaagtatgtgtgcaaatt

SEQ ID NO: 32928 - RNA, 21 nt, synthetic construct
  source 1..21: mol_type = other RNA; note = Description of Artificial Sequence: Synthetic oligonucleotide
tagaaaagtatgtgtgcaatt

SEQ ID NO: 32929 - RNA, 21 nt, synthetic construct
  source 1..21: mol_type = other RNA; note = Description of Artificial Sequence: Synthetic oligonucleotide
ttagaaaagtatgtgtgcatt

SEQ ID NO: 32930 - RNA, 21 nt, synthetic construct
  source 1..21: mol_type = other RNA; note = Description of Artificial Sequence: Synthetic oligonucleotide
tttagaaaagtatgtgtgctt

SEQ ID NO: 32931 - RNA, 21 nt, synthetic construct
  source 1..21: mol_type = other RNA; note = Description of Artificial Sequence: Synthetic oligonucleotide
tcttagaaaagtatgtgtgtt

SEQ ID NO: 32932 - RNA, 21 nt, synthetic construct
  source 1..21: mol_type = other RNA; note = Description of Artificial Sequence: Synthetic oligonucleotide
tccttagaaaagtatgtgttt

SEQ ID NO: 32933 - RNA, 21 nt, synthetic construct
  source 1..21: mol_type = other RNA; note = Description of Artificial Sequence: Synthetic oligonucleotide
tcccttagaaaagtatgtgtt

SEQ ID NO: 32934 - RNA, 21 nt, synthetic construct
  source 1..21: mol_type = other RNA; note = Description of Artificial Sequence: Synthetic oligonucleotide
ttcccttagaaaagtatgttt

SEQ ID NO: 32935 - RNA, 21 nt, synthetic construct
  source 1..21: mol_type = other RNA; note = Description of Artificial Sequence: Synthetic oligonucleotide
tgtcccttagaaaagtatgtt

SEQ ID NO: 32936 - RNA, 21 nt, synthetic construct
  source 1..21: mol_type = other RNA; note = Description of Artificial Sequence: Synthetic oligonucleotide
ttgtcccttagaaaagtattt

SEQ ID NO: 32937 - RNA, 21 nt, synthetic construct
  source 1..21: mol_type = other RNA; note = Description of Artificial Sequence: Synthetic oligonucleotide
tatgtcccttagaaaagtatt

SEQ ID NO: 32938 - RNA, 21 nt, synthetic construct
  source 1..21: mol_type = other RNA; note = Description of Artificial Sequence: Synthetic oligonucleotide
taatgtcccttagaaaagttt

SEQ ID NO: 32939 - RNA, 21 nt, synthetic construct
  source 1..21: mol_type = other RNA; note = Description of Artificial Sequence: Synthetic oligonucleotide
ttaatgtcccttagaaaagtt

SEQ ID NO: 32940 - RNA, 21 nt, synthetic construct
  source 1..21: mol_type = other RNA; note = Description of Artificial Sequence: Synthetic oligonucleotide
tataatgtcccttagaaaatt

SEQ ID NO: 32941 - RNA, 21 nt, synthetic construct
  source 1..21: mol_type = other RNA; note = Description of Artificial Sequence: Synthetic oligonucleotide
tgataatgtcccttagaaatt

SEQ ID NO: 32942 - RNA, 21 nt, synthetic construct
  source 1..21: mol_type = other RNA; note = Description of Artificial Sequence: Synthetic oligonucleotide
tagataatgtcccttagaatt

SEQ ID NO: 32943 - RNA, 21 nt, synthetic construct
  source 1..21: mol_type = other RNA; note = Description of Artificial Sequence: Synthetic oligonucleotide
taagataatgtcccttagatt

SEQ ID NO: 32944 - RNA, 21 nt, synthetic construct
  source 1..21: mol_type = other RNA; note = Description of Artificial Sequence: Synthetic oligonucleotide
tgaagataatgtcccttagtt

SEQ ID NO: 32945 - RNA, 21 nt, synthetic construct
  source 1..21: mol_type = other RNA; note = Description of Artificial Sequence: Synthetic oligonucleotide
tggaagataatgtcccttatt

SEQ ID NO: 32946 - RNA, 21 nt, synthetic construct
  source 1..21: mol_type = other RNA; note = Description of Artificial Sequence: Synthetic oligonucleotide
taggaagataatgtccctttt

SEQ ID NO: 32947 - RNA, 21 nt, synthetic construct
  source 1..21: mol_type = other RNA; note = Description of Artificial Sequence: Synthetic oligonucleotide
taaggaagataatgtcccttt

SEQ ID NO: 32948 - RNA, 21 nt, synthetic construct
  source 1..21: mol_type = other RNA; note = Description of Artificial Sequence: Synthetic oligonucleotide
tgaaggaagataatgtccctt

SEQ ID NO: 32949 - RNA, 21 nt, synthetic construct
  source 1..21: mol_type = other RNA; note = Description of Artificial Sequence: Synthetic oligonucleotide
ttgaaggaagataatgtcctt

SEQ ID NO: 32950 - RNA, 21 nt, synthetic construct
  source 1..21: mol_type = other RNA; note = Description of Artificial Sequence: Synthetic oligonucleotide
tctgaaggaagataatgtctt

SEQ ID NO: 32951 - RNA, 21 nt, synthetic construct
  source 1..21: mol_type = other RNA; note = Description of Artificial Sequence: Synthetic oligonucleotide
tcctgaaggaagataatgttt

SEQ ID NO: 32952 - RNA, 21 nt, synthetic construct
  source 1..21: mol_type = other RNA; note = Description of Artificial Sequence: Synthetic oligonucleotide
tacctgaaggaagataatgtt

SEQ ID NO: 32953 - RNA, 21 nt, synthetic construct
  source 1..21: mol_type = other RNA; note = Description of Artificial Sequence: Synthetic oligonucleotide
taacctgaaggaagataattt

SEQ ID NO: 32954 - RNA, 21 nt, synthetic construct
  source 1..21: mol_type = other RNA; note = Description of Artificial Sequence: Synthetic oligonucleotide
taaacctgaaggaagataatt

SEQ ID NO: 32955 - RNA, 21 nt, synthetic construct
  source 1..21: mol_type = other RNA; note = Description of Artificial Sequence: Synthetic oligonucleotide
taaaacctgaaggaagatatt

SEQ ID NO: 32956 - RNA, 21 nt, synthetic construct
  source 1..21: mol_type = other RNA; note = Description of Artificial Sequence: Synthetic oligonucleotide
taaaaacctgaaggaagattt

SEQ ID NO: 32957 - RNA, 21 nt, synthetic construct
  source 1..21: mol_type = other RNA; note = Description of Artificial Sequence: Synthetic oligonucleotide
ttaaaaacctgaaggaagatt

SEQ ID NO: 32958 - RNA, 21 nt, synthetic construct
  source 1..21: mol_type = other RNA; note = Description of Artificial Sequence: Synthetic oligonucleotide
tgtaaaaacctgaaggaagtt

SEQ ID NO: 32959 - RNA, 21 nt, synthetic construct
  source 1..21: mol_type = other RNA; note = Description of Artificial Sequence: Synthetic oligonucleotide
tggtaaaaacctgaaggaatt

SEQ ID NO: 32960 - RNA, 21 nt, synthetic construct
  source 1..21: mol_type = other RNA; note = Description of Artificial Sequence: Synthetic oligonucleotide
taggtaaaaacctgaaggatt

SEQ ID NO: 32961 - RNA, 21 nt, synthetic construct
  source 1..21: mol_type = other RNA; note = Description of Artificial Sequence: Synthetic oligonucleotide
tgaggtaaaaacctgaaggtt

SEQ ID NO: 32962 - RNA, 21 nt, synthetic construct
  source 1..21: mol_type = other RNA; note = Description of Artificial Sequence: Synthetic oligonucleotide
tggaggtaaaaacctgaagtt

SEQ ID NO: 32963 - RNA, 21 nt, synthetic construct
  source 1..21: mol_type = other RNA; note = Description of Artificial Sequence: Synthetic oligonucleotide
ttggaggtaaaaacctgaatt

SEQ ID NO: 32964 - RNA, 21 nt, synthetic construct
  source 1..21: mol_type = other RNA; note = Description of Artificial Sequence: Synthetic oligonucleotide
tgtggaggtaaaaacctgatt

SEQ ID NO: 32965 - RNA, 21 nt, synthetic construct
  source 1..21: mol_type = other RNA; note = Description of Artificial Sequence: Synthetic oligonucleotide
tagtggaggtaaaaacctgtt

SEQ ID NO: 32966 - RNA, 21 nt, synthetic construct
  source 1..21: mol_type = other RNA; note = Description of Artificial Sequence: Synthetic oligonucleotide
tgagtggaggtaaaaaccttt

SEQ ID NO: 32967 - RNA, 21 nt, synthetic construct
  source 1..21: mol_type = other RNA; note = Description of Artificial Sequence: Synthetic oligonucleotide
ttgagtggaggtaaaaacctt

SEQ ID NO: 32968 - RNA, 21 nt, synthetic construct
  source 1..21: mol_type = other RNA; note = Description of Artificial Sequence: Synthetic oligonucleotide
tatgagtggaggtaaaaactt

SEQ ID NO: 32969 - RNA, 21 nt, synthetic construct
  source 1..21: mol_type = other RNA; note = Description of Artificial Sequence: Synthetic oligonucleotide
tgatgagtggaggtaaaaatt

SEQ ID NO: 32970 - RNA, 21 nt, synthetic construct
  source 1..21: mol_type = other RNA; note = Description of Artificial Sequence: Synthetic oligonucleotide
tggatgagtggaggtaaaatt

SEQ ID NO: 32971 - RNA, 21 nt, synthetic construct
  source 1..21: mol_type = other RNA; note = Description of Artificial Sequence: Synthetic oligonucleotide
taggatgagtggaggtaaatt

SEQ ID NO: 32972 - RNA, 21 nt, synthetic construct
  source 1..21: mol_type = other RNA; note = Description of Artificial Sequence: Synthetic oligonucleotide
taaggatgagtggaggtaatt

SEQ ID NO: 32973 - RNA, 21 nt, synthetic construct
  source 1..21: mol_type = other RNA; note = Description of Artificial Sequence: Synthetic oligonucleotide
ttaaggatgagtggaggtatt

SEQ ID NO: 32974 - RNA, 21 nt, synthetic construct
  source 1..21: mol_type = other RNA; note = Description of Artificial Sequence: Synthetic oligonucleotide
tctaaggatgagtggaggttt

SEQ ID NO: 32975 - RNA, 21 nt, synthetic construct
  source 1..21: mol_type = other RNA; note = Description of Artificial Sequence: Synthetic oligonucleotide
ttctaaggatgagtggaggtt

SEQ ID NO: 32976 - RNA, 21 nt, synthetic construct
  source 1..21: mol_type = other RNA; note = Description of Artificial Sequence: Synthetic oligonucleotide
tctctaaggatgagtggagtt

SEQ ID NO: 32977 - RNA, 21 nt, synthetic construct
  source 1..21: mol_type = other RNA; note = Description of Artificial Sequence: Synthetic oligonucleotide
tgctctaaggatgagtggatt

SEQ ID NO: 32978 - RNA, 21 nt, synthetic construct
  source 1..21: mol_type = other RNA; note = Description of Artificial Sequence: Synthetic oligonucleotide
tggctctaaggatgagtggtt

SEQ ID NO: 32979 - RNA, 21 nt, synthetic construct
  source 1..21: mol_type = other RNA; note = Description of Artificial Sequence: Synthetic oligonucleotide
tgggctctaaggatgagtgtt

SEQ ID NO: 32980 - RNA, 21 nt, synthetic construct
  source 1..21: mol_type = other RNA; note = Description of Artificial Sequence: Synthetic oligonucleotide
ttgggctctaaggatgagttt

SEQ ID NO: 32981 - RNA, 21 nt, synthetic construct
  source 1..21: mol_type = other RNA; note = Description of Artificial Sequence: Synthetic oligonucleotide
tgtgggctctaaggatgagtt

SEQ ID NO: 32982 - RNA, 21 nt, synthetic construct
  source 1..21: mol_type = other RNA; note = Description of Artificial Sequence: Synthetic oligonucleotide
tagtgggctctaaggatgatt

SEQ ID NO: 32983 - RNA, 21 nt, synthetic construct
  source 1..21: mol_type = other RNA; note = Description of Artificial Sequence: Synthetic oligonucleotide
tcagtgggctctaaggatgtt

SEQ ID NO: 32984 - RNA, 21 nt, synthetic construct
  source 1..21: mol_type = other RNA; note = Description of Artificial Sequence: Synthetic oligonucleotide
ttcagtgggctctaaggattt

SEQ ID NO: 32985 - RNA, 21 nt, synthetic construct
  source 1..21: mol_type = other RNA; note = Description of Artificial Sequence: Synthetic oligonucleotide
tgtcagtgggctctaaggatt

SEQ ID NO: 32986 - RNA, 21 nt, synthetic construct
  source 1..21: mol_type = other RNA; note = Description of Artificial Sequence: Synthetic oligonucleotide
tagtcagtgggctctaaggtt

SEQ ID NO: 32987 - RNA, 21 nt, synthetic construct
  source 1..21: mol_type = other RNA; note = Description of Artificial Sequence: Synthetic oligonucleotide
tcagtcagtgggctctaagtt

SEQ ID NO: 32988 - RNA, 21 nt, synthetic construct
  source 1..21: mol_type = other RNA; note = Description of Artificial Sequence: Synthetic oligonucleotide
tgcagtcagtgggctctaatt

SEQ ID NO: 32989 - RNA, 21 nt, synthetic construct
  source 1..21: mol_type = other RNA; note = Description of Artificial Sequence: Synthetic oligonucleotide
tagcagtcagtgggctctatt

SEQ ID NO: 32990 - RNA, 21 nt, synthetic construct
  source 1..21: mol_type = other RNA; note = Description of Artificial Sequence: Synthetic oligonucleotide
tgagcagtcagtgggctcttt

SEQ ID NO: 32991 - RNA, 21 nt, synthetic construct
  source 1..21: mol_type = other RNA; note = Description of Artificial Sequence: Synthetic oligonucleotide
tggagcagtcagtgggctctt

SEQ ID NO: 32992 - RNA, 21 nt, synthetic construct
  source 1..21: mol_type = other RNA; note = Description of Artificial Sequence: Synthetic oligonucleotide
tgggagcagtcagtgggcttt

SEQ ID NO: 32993 - RNA, 21 nt, synthetic construct
  source 1..21: mol_type = other RNA; note = Description of Artificial Sequence: Synthetic oligonucleotide
tggggagcagtcagtgggctt

SEQ ID NO: 32994 - RNA, 21 nt, synthetic construct
  source 1..21: mol_type = other RNA; note = Description of Artificial Sequence: Synthetic oligonucleotide
taggggagcagtcagtgggtt

SEQ ID NO: 32995 - RNA, 21 nt, synthetic construct
  source 1..21: mol_type = other RNA; note = Description of Artificial Sequence: Synthetic oligonucleotide
taaggggagcagtcagtggtt

SEQ ID NO: 32996 - RNA, 21 nt, synthetic construct
  source 1..21: mol_type = other RNA; note = Description of Artificial Sequence: Synthetic oligonucleotide
taaaggggagcagtcagtgtt

SEQ ID NO: 32997 - RNA, 21 nt, synthetic construct
  source 1..21: mol_type = other RNA; note = Description of Artificial Sequence: Synthetic oligonucleotide
ttaaaggggagcagtcagttt

SEQ ID NO: 32998 - RNA, 21 nt, synthetic construct
  source 1..21: mol_type = other RNA; note = Description of Artificial Sequence: Synthetic oligonucleotide
tataaaggggagcagtcagtt

SEQ ID NO: 32999 - RNA, 21 nt, synthetic construct
  source 1..21: mol_type = other RNA; note = Description of Artificial Sequence: Synthetic oligonucleotide
ttataaaggggagcagtcatt

SEQ ID NO: 33000 - RNA, 21 nt, synthetic construct
  source 1..21: mol_type = other RNA; note = Description of Artificial Sequence: Synthetic oligonucleotide
tgtataaaggggagcagtctt

SEQ ID NO: 33001 - RNA, 21 nt, synthetic construct
  source 1..21: mol_type = other RNA; note = Description of Artificial Sequence: Synthetic oligonucleotide
tggtataaaggggagcagttt

SEQ ID NO: 33002 - RNA, 21 nt, synthetic construct
  source 1..21: mol_type = other RNA; note = Description of Artificial Sequence: Synthetic oligonucleotide
taggtataaaggggagcagtt

SEQ ID NO: 33003 - RNA, 21 nt, synthetic construct
  source 1..21: mol_type = other RNA; note = Description of Artificial Sequence: Synthetic oligonucleotide
tcaggtataaaggggagcatt

SEQ ID NO: 33004 - RNA, 21 nt, synthetic construct
  source 1..21: mol_type = other RNA; note = Description of Artificial Sequence: Synthetic oligonucleotide
tacaggtataaaggggagctt

SEQ ID NO: 33005 - RNA, 21 nt, synthetic construct
  source 1..21: mol_type = other RNA; note = Description of Artificial Sequence: Synthetic oligonucleotide
taacaggtataaaggggagtt

SEQ ID NO: 33006 - RNA, 21 nt, synthetic construct
  source 1..21: mol_type = other RNA; note = Description of Artificial Sequence: Synthetic oligonucleotide
tcaacaggtataaaggggatt

SEQ ID NO: 33007 - RNA, 21 nt, synthetic construct
  source 1..21: mol_type = other RNA; note = Description of Artificial Sequence: Synthetic oligonucleotide
tccaacaggtataaaggggtt

SEQ ID NO: 33008 - RNA, 21 nt, synthetic construct
  source 1..21: mol_type = other RNA; note = Description of Artificial Sequence: Synthetic oligonucleotide
tgccaacaggtataaagggtt

SEQ ID NO: 33009 - RNA, 21 nt, synthetic construct
  source 1..21: mol_type = other RNA; note = Description of Artificial Sequence: Synthetic oligonucleotide
tggccaacaggtataaaggtt

SEQ ID NO: 33010 - RNA, 21 nt, synthetic construct
  source 1..21: mol_type = other RNA; note = Description of Artificial Sequence: Synthetic oligonucleotide
tgggccaacaggtataaagtt

SEQ ID NO: 33011 - RNA, 21 nt, synthetic construct
  source 1..21: mol_type = other RNA; note = Description of Artificial Sequence: Synthetic oligonucleotide
tagggccaacaggtataaatt

SEQ ID NO: 33012 - RNA, 21 nt, synthetic construct
  source 1..21: mol_type = other RNA; note = Description of Artificial Sequence: Synthetic oligonucleotide
tcagggccaacaggtataatt

SEQ ID NO: 33013 - RNA, 21 nt, synthetic construct
  source 1..21: mol_type = other RNA; note = Description of Artificial Sequence: Synthetic oligonucleotide
tgcagggccaacaggtatatt

SEQ ID NO: 33014 - RNA, 21 nt, synthetic construct
  source 1..21: mol_type = other RNA; note = Description of Artificial Sequence: Synthetic oligonucleotide
tggcagggccaacaggtattt

SEQ ID NO: 33015 - RNA, 21 nt, synthetic construct
  source 1..21: mol_type = other RNA; note = Description of Artificial Sequence: Synthetic oligonucleotide
taggcagggccaacaggtatt

SEQ ID NO: 33016 - RNA, 21 nt, synthetic construct
  source 1..21: mol_type = other RNA; note = Description of Artificial Sequence: Synthetic oligonucleotide
ttaggcagggccaacaggttt

SEQ ID NO: 33017 - RNA, 21 nt, synthetic construct
  source 1..21: mol_type = other RNA; note = Description of Artificial Sequence: Synthetic oligonucleotide
tataggcagggccaacaggtt

SEQ ID NO: 33018 - RNA, 21 nt, synthetic construct
  source 1..21: mol_type = other RNA; note = Description of Artificial Sequence: Synthetic oligonucleotide
ttataggcagggccaacagtt

SEQ ID NO: 33019 - RNA, 21 nt, synthetic construct
  source 1..21: mol_type = other RNA; note = Description of Artificial Sequence: Synthetic oligonucleotide
tctataggcagggccaacatt

SEQ ID NO: 33020 - RNA, 21 nt, synthetic construct
  source 1..21: mol_type = other RNA; note = Description of Artificial Sequence: Synthetic oligonucleotide
tcctataggcagggccaactt

SEQ ID NO: 33021 - RNA, 21 nt, synthetic construct
  source 1..21: mol_type = other RNA; note = Description of Artificial Sequence: Synthetic oligonucleotide
ttcctataggcagggccaatt

SEQ ID NO: 33022 - RNA, 21 nt, synthetic construct
  source 1..21: mol_type = other RNA; note = Description of Artificial Sequence: Synthetic oligonucleotide
tctcctataggcagggccatt

SEQ ID NO: 33023 - RNA, 21 nt, synthetic construct
  source 1..21: mol_type = other RNA; note = Description of Artificial Sequence: Synthetic oligonucleotide
ttctcctataggcagggcctt

SEQ ID NO: 33024 - RNA, 21 nt, synthetic construct
  source 1..21: mol_type = other RNA; note = Description of Artificial Sequence: Synthetic oligonucleotide
tctctcctataggcagggctt

SEQ ID NO: 33025 - RNA, 21 nt, synthetic construct
  source 1..21: mol_type = other RNA; note = Description of Artificial Sequence: Synthetic oligonucleotide
ttctctcctataggcagggtt

SEQ ID NO: 33026 - RNA, 21 nt, synthetic construct
  source 1..21: mol_type = other RNA; note = Description of Artificial Sequence: Synthetic oligonucleotide
tttctctcctataggcaggtt

SEQ ID NO: 33027 - RNA, 21 nt, synthetic construct
  source 1..21: mol_type = other RNA; note = Description of Artificial Sequence: Synthetic oligonucleotide
tattctctcctataggcagtt

SEQ ID NO: 33028 - RNA, 21 nt, synthetic construct
  source 1..21: mol_type = other RNA; note = Description of Artificial Sequence: Synthetic oligonucleotide
ttattctctcctataggcatt

SEQ ID NO: 33029 - RNA, 21 nt, synthetic construct
  source 1..21: mol_type = other RNA; note = Description of Artificial Sequence: Synthetic oligonucleotide
tatattctctcctataggctt

SEQ ID NO: 33030 - RNA, 21 nt, synthetic construct
  source 1..21: mol_type = other RNA; note = Description of Artificial Sequence: Synthetic oligonucleotide
taatattctctcctataggtt

SEQ ID NO: 33031 - RNA, 21 nt, synthetic construct
  source 1..21: mol_type = other RNA; note = Description of Artificial Sequence: Synthetic oligonucleotide
taaatattctctcctatagtt

SEQ ID NO: 33032 - RNA, 21 nt, synthetic construct
  source 1..21: mol_type = other RNA; note = Description of Artificial Sequence: Synthetic oligonucleotide
tcaaatattctctcctatatt

SEQ ID NO: 33033 - RNA, 21 nt, synthetic construct
  source 1..21: mol_type = other RNA; note = Description of Artificial Sequence: Synthetic oligonucleotide
tccaaatattctctcctattt

SEQ ID NO: 33034 - RNA, 21 nt, synthetic construct
  source 1..21: mol_type = other RNA; note = Description of Artificial Sequence: Synthetic oligonucleotide
ttccaaatattctctcctatt

SEQ ID NO: 33035 - RNA, 21 nt, synthetic construct
  source 1..21: mol_type = other RNA; note = Description of Artificial Sequence: Synthetic oligonucleotide
tctccaaatattctctccttt

SEQ ID NO: 33036 - RNA, 21 nt, synthetic construct
  source 1..21: mol_type = other RNA; note = Description of Artificial Sequence: Synthetic oligonucleotide
ttctccaaatattctctcctt

SEQ ID NO: 33037 - RNA, 21 nt, synthetic construct
  source 1..21: mol_type = other RNA; note = Description of Artificial Sequence: Synthetic oligonucleotide
tatctccaaatattctctctt

SEQ ID NO: 33038 - RNA, 21 nt, synthetic construct
  source 1..21: mol_type = other RNA; note = Description of Artificial Sequence: Synthetic oligonucleotide
ttatctccaaatattctcttt

SEQ ID NO: 33039 - RNA, 21 nt, synthetic construct
  source 1..21: mol_type = other RNA; note = Description of Artificial Sequence: Synthetic oligonucleotide
tctatctccaaatattctctt

SEQ ID NO: 33040 - RNA, 21 nt, synthetic construct
  source 1..21: mol_type = other RNA; note = Description of Artificial Sequence: Synthetic oligonucleotide
tcctatctccaaatattcttt

SEQ ID NO: 33041 - RNA, 21 nt, synthetic construct
  source 1..21: mol_type = other RNA; note = Description of Artificial Sequence: Synthetic oligonucleotide
tgcctatctccaaatattctt

SEQ ID NO: 33042 - RNA, 21 nt, synthetic construct
  source 1..21: mol_type = other RNA; note = Description of Artificial Sequence: Synthetic oligonucleotide
ttgcctatctccaaatatttt

SEQ ID NO: 33043 - RNA, 21 nt, synthetic construct
  source 1..21: mol_type = other RNA; note = Description of Artificial Sequence: Synthetic oligonucleotide
tctgcctatctccaaatattt

SEQ ID NO: 33044 - RNA, 21 nt, synthetic construct
  source 1..21: mol_type = other RNA; note = Description of Artificial Sequence: Synthetic oligonucleotide
tgctgcctatctccaaatatt

SEQ ID NO: 33045 - RNA, 21 nt, synthetic construct
  source 1..21: mol_type = other RNA; note = Description of Artificial Sequence: Synthetic oligonucleotide
tagctgcctatctccaaattt

SEQ ID NO: 33046 - RNA, 21 nt, synthetic construct
  source 1..21: mol_type = other RNA; note = Description of Artificial Sequence: Synthetic oligonucleotide
taagctgcctatctccaaatt

SEQ ID NO: 33047 - RNA, 21 nt, synthetic construct
  source 1..21: mol_type = other RNA; note = Description of Artificial Sequence: Synthetic oligonucleotide
tgaagctgcctatctccaatt

SEQ ID NO: 33048 - RNA, 21 nt, synthetic construct
  source 1..21: mol_type = other RNA; note = Description of Artificial Sequence: Synthetic oligonucleotide
ttgaagctgcctatctccatt

SEQ ID NO: 33049 - RNA, 21 nt, synthetic construct
  source 1..21: mol_type = other RNA; note = Description of Artificial Sequence: Synthetic oligonucleotide
tctgaagctgcctatctcctt

SEQ ID NO: 33050 - RNA, 21 nt, synthetic construct
  source 1..21: mol_type = other RNA; note = Description of Artificial Sequence: Synthetic oligonucleotide
tcctgaagctgcctatctctt

SEQ ID NO: 33051 - RNA, 21 nt, synthetic construct
  source 1..21: mol_type = other RNA; note = Description of Artificial Sequence: Synthetic oligonucleotide
ttcctgaagctgcctatcttt

SEQ ID NO: 33052 - RNA, 21 nt, synthetic construct
  source 1..21: mol_type = other RNA; note = Description of Artificial Sequence: Synthetic oligonucleotide
tatcctgaagctgcctatctt

SEQ ID NO: 33053 - RNA, 21 nt, synthetic construct
  source 1..21: mol_type = other RNA; note = Description of Artificial Sequence: Synthetic oligonucleotide
tcatcctgaagctgcctattt

SEQ ID NO: 33054 - RNA, 21 nt, synthetic construct
  source 1..21: mol_type = other RNA; note = Description of Artificial Sequence: Synthetic oligonucleotide
tgcatcctgaagctgcctatt

SEQ ID NO: 33055 - RNA, 21 nt, synthetic construct
  source 1..21: mol_type = other RNA; note = Description of Artificial Sequence: Synthetic oligonucleotide
ttgcatcctgaagctgccttt

SEQ ID NO: 33056 - RNA, 21 nt, synthetic construct
  source 1..21: mol_type = other RNA; note = Description of Artificial Sequence: Synthetic oligonucleotide
tatgcatcctgaagctgcctt

SEQ ID NO: 33057 - RNA, 21 nt, synthetic construct
  source 1..21: mol_type = other RNA; note = Description of Artificial Sequence: Synthetic oligonucleotide
taatgcatcctgaagctgctt

SEQ ID NO: 33058 - RNA, 21 nt, synthetic construct
  source 1..21: mol_type = other RNA; note = Description of Artificial Sequence: Synthetic oligonucleotide
tcaatgcatcctgaagctgtt

SEQ ID NO: 33059 - RNA, 21 nt, synthetic construct
  source 1..21: mol_type = other RNA; note = Description of Artificial Sequence: Synthetic oligonucleotide
tgcaatgcatcctgaagcttt

SEQ ID NO: 33060 - RNA, 21 nt, synthetic construct
  source 1..21: mol_type = other RNA; note = Description of Artificial Sequence: Synthetic oligonucleotide
ttgcaatgcatcctgaagctt

SEQ ID NO: 33061 - RNA, 21 nt, synthetic construct
  source 1..21: mol_type = other RNA; note = Description of Artificial Sequence: Synthetic oligonucleotide
tttgcaatgcatcctgaagtt

SEQ ID NO: 33062 - RNA, 21 nt, synthetic construct
  source 1..21: mol_type = other RNA; note = Description of Artificial Sequence: Synthetic oligonucleotide
tattgcaatgcatcctgaatt

SEQ ID NO: 33063 - RNA, 21 nt, synthetic construct
  source 1..21: mol_type = other RNA; note = Description of Artificial Sequence: Synthetic oligonucleotide
tgattgcaatgcatcctgatt

SEQ ID NO: 33064 - RNA, 21 nt, synthetic construct
  source 1..21: mol_type = other RNA; note = Description of Artificial Sequence: Synthetic oligonucleotide
ttgattgcaatgcatcctgtt

SEQ ID NO: 33065 - RNA, 21 nt, synthetic construct
  source 1..21: mol_type = other RNA; note = Description of Artificial Sequence: Synthetic oligonucleotide
tatgattgcaatgcatccttt

SEQ ID NO: 33066 - RNA, 21 nt, synthetic construct
  source 1..21: mol_type = other RNA; note = Description of Artificial Sequence: Synthetic oligonucleotide
tgatgattgcaatgcatcctt

SEQ ID NO: 33067 - RNA, 21 nt, synthetic construct
  source 1..21: mol_type = other RNA; note = Description of Artificial Sequence: Synthetic oligonucleotide
tggatgattgcaatgcatctt

SEQ ID NO: 33068 - RNA, 21 nt, synthetic construct
  source 1..21: mol_type = other RNA; note = Description of Artificial Sequence: Synthetic oligonucleotide
taggatgattgcaatgcattt

SEQ ID NO: 33069 - RNA, 21 nt, synthetic construct
  source 1..21: mol_type = other RNA; note = Description of Artificial Sequence: Synthetic oligonucleotide
taaggatgattgcaatgcatt

SEQ ID NO: 33070 - RNA, 21 nt, synthetic construct
  source 1..21: mol_type = other RNA; note = Description of Artificial Sequence: Synthetic oligonucleotide
taaaggatgattgcaatgctt

SEQ ID NO: 33071 - RNA, 21 nt, synthetic construct
  source 1..21: mol_type = other RNA; note = Description of Artificial Sequence: Synthetic oligonucleotide
taaaaggatgattgcaatgtt

SEQ ID NO: 33072 - RNA, 21 nt, synthetic construct
  source 1..21: mol_type = other RNA; note = Description of Artificial Sequence: Synthetic oligonucleotide
tgaaaaggatgattgcaattt

SEQ ID NO: 33073 - RNA, 21 nt, synthetic construct
  source 1..21: mol_type = other RNA; note = Description of Artificial Sequence: Synthetic oligonucleotide
tagaaaaggatgattgcaatt

SEQ ID NO: 33074 - RNA, 21 nt, synthetic construct
  source 1..21: mol_type = other RNA; note = Description of Artificial Sequence: Synthetic oligonucleotide
taagaaaaggatgattgcatt

SEQ ID NO: 33075 - RNA, 21 nt, synthetic construct
  source 1..21: mol_type = other RNA; note = Description of Artificial Sequence: Synthetic oligonucleotide
ttaagaaaaggatgattgctt

SEQ ID NO: 33076 - RNA, 21 nt, synthetic construct
  source 1..21: mol_type = other RNA; note = Description of Artificial Sequence: Synthetic oligonucleotide
tttaagaaaaggatgattgtt

SEQ ID NO: 33077 - RNA, 21 nt, synthetic construct
  source 1..21: mol_type = other RNA; note = Description of Artificial Sequence: Synthetic oligonucleotide
ttttaagaaaaggatgatttt

SEQ ID NO: 33078 - RNA, 21 nt, synthetic construct
  source 1..21: mol_type = other RNA; note = Description of Artificial Sequence: Synthetic oligonucleotide
tatttaagaaaaggatgattt

SEQ ID NO: 33079 - RNA, 21 nt, synthetic construct
  source 1..21: mol_type = other RNA; note = Description of Artificial Sequence: Synthetic oligonucleotide
taatttaagaaaaggatgatt

SEQ ID NO: 33080 - RNA, 21 nt, synthetic construct
  source 1..21: mol_type = other RNA; note = Description of Artificial Sequence: Synthetic oligonucleotide
ttaatttaagaaaaggatgtt

SEQ ID NO: 33081 - RNA, 21 nt, synthetic construct
  source 1..21: mol_type = other RNA; note = Description of Artificial Sequence: Synthetic oligonucleotide
tataatttaagaaaaggattt

SEQ ID NO: 33082 - RNA, 21 nt, synthetic construct
  source 1..21: mol_type = other RNA; note = Description of Artificial Sequence: Synthetic oligonucleotide
tcataatttaagaaaaggatt

SEQ ID NO: 33083 - RNA, 21 nt, synthetic construct
  source 1..21: mol_type = other RNA; note = Description of Artificial Sequence: Synthetic oligonucleotide
tacataatttaagaaaaggtt

SEQ ID NO: 33084 - RNA, 21 nt, synthetic construct
  source 1..21: mol_type = other RNA; note = Description of Artificial Sequence: Synthetic oligonucleotide
tgacataatttaagaaaagtt

SEQ ID NO: 33085 - RNA, 21 nt, synthetic construct
  source 1..21: mol_type = other RNA; note = Description of Artificial Sequence: Synthetic oligonucleotide
ttgacataatttaagaaaatt

SEQ ID NO: 33086 - RNA, 21 nt, synthetic construct
  source 1..21: mol_type = other RNA; note = Description of Artificial Sequence: Synthetic oligonucleotide
tgtgacataatttaagaaatt

SEQ ID NO: 33087 - RNA, 21 nt, synthetic construct
  source 1..21: mol_type = other RNA; note = Description of Artificial Sequence: Synthetic oligonucleotide
tagtgacataatttaagaatt

SEQ ID NO: 33088 - RNA, 21 nt, synthetic construct
  source 1..21: mol_type = other RNA; note = Description of Artificial Sequence: Synthetic oligonucleotide
ttagtgacataatttaagatt

SEQ ID NO: 33089 - RNA, 21 nt, synthetic construct
  source 1..21: mol_type = other RNA; note = Description of Artificial Sequence: Synthetic oligonucleotide
tctagtgacataatttaagtt

SEQ ID NO: 33090 - RNA, 21 nt, synthetic construct
  source 1..21: mol_type = other RNA; note = Description of Artificial Sequence: Synthetic oligonucleotide
tactagtgacataatttaatt

SEQ ID NO: 33091 - RNA, 21 nt, synthetic construct
  source 1..21: mol_type = other RNA; note = Description of Artificial Sequence: Synthetic oligonucleotide
tgactagtgacataatttatt

SEQ ID NO: 33092 - RNA, 21 nt, synthetic construct
  source 1..21: mol_type = other RNA; note = Description of Artificial Sequence: Synthetic oligonucleotide
tagactagtgacataattttt

SEQ ID NO: 33093 - RNA, 21 nt, synthetic construct
  source 1..21: mol_type = other RNA; note = Description of Artificial Sequence: Synthetic oligonucleotide
taagactagtgacataatttt

SEQ ID NO: 33094 - RNA, 21 nt, synthetic construct
  source 1..21: mol_type = other RNA; note = Description of Artificial Sequence: Synthetic oligonucleotide
taaagactagtgacataattt

SEQ ID NO: 33095 - RNA, 21 nt, synthetic construct
  source 1..21: mol_type = other RNA; note = Description of Artificial Sequence: Synthetic oligonucleotide
taaaagactagtgacataatt

SEQ ID NO: 33096 - RNA, 21 nt, synthetic construct
  source 1..21: mol_type = other RNA; note = Description of Artificial Sequence: Synthetic oligonucleotide
ttaaaagactagtgacatatt

SEQ ID NO: 33097 - RNA, 21 nt, synthetic construct
  source 1..21: mol_type = other RNA; note = Description of Artificial Sequence: Synthetic oligonucleotide
tataaaagactagtgacattt

SEQ ID NO: 33098 - RNA, 21 nt, synthetic construct
  source 1..21: mol_type = other RNA; note = Description of Artificial Sequence: Synthetic oligonucleotide
taataaaagactagtgacatt

SEQ ID NO: 33099 - RNA, 21 nt, synthetic construct
  source 1..21: mol_type = other RNA; note = Description of Artificial Sequence: Synthetic oligonucleotide
taaataaaagactagtgactt

SEQ ID NO: 33100 - RNA, 21 nt, synthetic construct
  source 1..21: mol_type = other RNA; note = Description of Artificial Sequence: Synthetic oligonucleotide
taaaataaaagactagtgatt

SEQ ID NO: 33101 - RNA, 21 nt, synthetic construct
  source 1..21: mol_type = other RNA; note = Description of Artificial Sequence: Synthetic oligonucleotide
taaaaataaaagactagtgtt

SEQ ID NO: 33102 - RNA, 21 nt, synthetic construct
  source 1..21: mol_type = other RNA; note = Description of Artificial Sequence: Synthetic oligonucleotide
taaaaaataaaagactagttt

SEQ ID NO: 33103 - RNA, 21 nt, synthetic construct
  source 1..21: mol_type = other RNA; note = Description of Artificial Sequence: Synthetic oligonucleotide
tgaaaaaataaaagactagtt

SEQ ID NO: 33104 - RNA, 21 nt, synthetic construct
  source 1..21: mol_type = other RNA; note = Description of Artificial Sequence: Synthetic oligonucleotide
tggaaaaaataaaagactatt

SEQ ID NO: 33105 - RNA, 21 nt, synthetic construct
  source 1..21: mol_type = other RNA; note = Description of Artificial Sequence: Synthetic oligonucleotide
tgggaaaaaataaaagacttt

SEQ ID NO: 33106 - RNA, 21 nt, synthetic construct
  source 1..21: mol_type = other RNA; note = Description of Artificial Sequence: Synthetic oligonucleotide
tggggaaaaaataaaagactt

SEQ ID NO: 33107 - RNA, 21 nt, synthetic construct
  source 1..21: mol_type = other RNA; note = Description of Artificial Sequence: Synthetic oligonucleotide
taggggaaaaaataaaagatt

SEQ ID NO: 33108 - RNA, 21 nt, synthetic construct
  source 1..21: mol_type = other RNA; note = Description of Artificial Sequence: Synthetic oligonucleotide
tgaggggaaaaaataaaagtt

SEQ ID NO: 33109 - RNA, 21 nt, synthetic construct
  source 1..21: mol_type = other RNA; note = Description of Artificial Sequence: Synthetic oligonucleotide
tagaggggaaaaaataaaatt

SEQ ID NO: 33110 - RNA, 21 nt, synthetic construct
  source 1..21: mol_type = other RNA; note = Description of Artificial Sequence: Synthetic oligonucleotide
taagaggggaaaaaataaatt

SEQ ID NO: 33111 - RNA, 21 nt, synthetic construct
  source 1..21: mol_type = other RNA; note = Description of Artificial Sequence: Synthetic oligonucleotide
tcaagaggggaaaaaataatt

SEQ ID NO: 33112 - RNA, 21 nt, synthetic construct
  source 1..21: mol_type = other RNA; note = Description of Artificial Sequence: Synthetic oligonucleotide
ttcaagaggggaaaaaatatt

SEQ ID NO: 33113 - RNA, 21 nt, synthetic construct
  source 1..21: mol_type = other RNA; note = Description of Artificial Sequence: Synthetic oligonucleotide
tttcaagaggggaaaaaattt

SEQ ID NO: 33114 - RNA, 21 nt, synthetic construct
  source 1..21: mol_type = other RNA; note = Description of Artificial Sequence: Synthetic oligonucleotide
tgttcaagaggggaaaaaatt

SEQ ID NO: 33115 - RNA, 21 nt, synthetic construct
  source 1..21: mol_type = other RNA; note = Description of Artificial Sequence: Synthetic oligonucleotide
tagttcaagaggggaaaaatt

SEQ ID NO: 33116 - RNA, 21 nt, synthetic construct
  source 1..21: mol_type = other RNA; note = Description of Artificial Sequence: Synthetic oligonucleotide
taagttcaagaggggaaaatt

SEQ ID NO: 33117 - RNA, 21 nt, synthetic construct
  source 1..21: mol_type = other RNA; note = Description of Artificial Sequence: Synthetic oligonucleotide
taaagttcaagaggggaaatt

SEQ ID NO: 33118 - RNA, 21 nt, synthetic construct
  source 1..21: mol_type = other RNA; note = Description of Artificial Sequence: Synthetic oligonucleotide
tgaaagttcaagaggggaatt

SEQ ID NO: 33119 - RNA, 21 nt, synthetic construct
  source 1..21: mol_type = other RNA; note = Description of Artificial Sequence: Synthetic oligonucleotide
tggaaagttcaagaggggatt

SEQ ID NO: 33120 - RNA, 21 nt, synthetic construct
  source 1..21: mol_type = other RNA; note = Description of Artificial Sequence: Synthetic oligonucleotide
taggaaagttcaagaggggtt

SEQ ID NO: 33121 - RNA, 21 nt, synthetic construct
  source 1..21: mol_type = other RNA; note = Description of Artificial Sequence: Synthetic oligonucleotide
tgaggaaagttcaagagggtt

SEQ ID NO: 33122 - RNA, 21 nt, synthetic construct
  source 1..21: mol_type = other RNA; note = Description of Artificial Sequence: Synthetic oligonucleotide
ttgaggaaagttcaagaggtt

SEQ ID NO: 33123 - RNA, 21 nt, synthetic construct
  source 1..21: mol_type = other RNA; note = Description of Artificial Sequence: Synthetic oligonucleotide
tgtgaggaaagttcaagagtt

SEQ ID NO: 33124 - RNA, 21 nt, synthetic construct
  source 1..21: mol_type = other RNA; note = Description of Artificial Sequence: Synthetic oligonucleotide
ttgtgaggaaagttcaagatt

SEQ ID NO: 33125 - RNA, 21 nt, synthetic construct
  source 1..21: mol_type = other RNA; note = Description of Artificial Sequence: Synthetic oligonucleotide
tgtgtgaggaaagttcaagtt

SEQ ID NO: 33126 - RNA, 21 nt, synthetic construct
  source 1..21: mol_type = other RNA; note = Description of Artificial Sequence: Synthetic oligonucleotide
tggtgtgaggaaagttcaatt

SEQ ID NO: 33127 - RNA, 21 nt, synthetic construct
  source 1..21: mol_type = other RNA; note = Description of Artificial Sequence: Synthetic oligonucleotide
taggtgtgaggaaagttcatt

SEQ ID NO: 33128 - RNA, 21 nt, synthetic construct
  source 1..21: mol_type = other RNA; note = Description of Artificial Sequence: Synthetic oligonucleotide
tcaggtgtgaggaaagttctt

SEQ ID NO: 33129 - RNA, 21 nt, synthetic construct
  source 1..21: mol_type = other RNA; note = Description of Artificial Sequence: Synthetic oligonucleotide
tccaggtgtgaggaaagtttt

SEQ ID NO: 33130 - RNA, 21 nt, synthetic construct
  source 1..21: mol_type = other RNA; note = Description of Artificial Sequence: Synthetic oligonucleotide
ttccaggtgtgaggaaagttt

SEQ ID NO: 33131 - RNA, 21 nt, synthetic construct
  source 1..21: mol_type = other RNA; note = Description of Artificial Sequence: Synthetic oligonucleotide
tttccaggtgtgaggaaagtt

SEQ ID NO: 33132 - RNA, 21 nt, synthetic construct
  source 1..21: mol_type = other RNA; note = Description of Artificial Sequence: Synthetic oligonucleotide
tcttccaggtgtgaggaaatt

SEQ ID NO: 33133 - RNA, 21 nt, synthetic construct
  source 1..21: mol_type = other RNA; note = Description of Artificial Sequence: Synthetic oligonucleotide
ttcttccaggtgtgaggaatt

SEQ ID NO: 33134 - RNA, 21 nt, synthetic construct
  source 1..21: mol_type = other RNA; note = Description of Artificial Sequence: Synthetic oligonucleotide
tttcttccaggtgtgaggatt

SEQ ID NO: 33135 - RNA, 21 nt, synthetic construct
  source 1..21: mol_type = other RNA; note = Description of Artificial Sequence: Synthetic oligonucleotide
ttttcttccaggtgtgaggtt

SEQ ID NO: 33136 - RNA, 21 nt, synthetic construct
  source 1..21: mol_type = other RNA; note = Description of Artificial Sequence: Synthetic oligonucleotide
tgtttcttccaggtgtgagtt

SEQ ID NO: 33137 - RNA, 21 nt, synthetic construct
  source 1..21: mol_type = other RNA; note = Description of Artificial Sequence: Synthetic oligonucleotide
ttgtttcttccaggtgtgatt

SEQ ID NO: 33138 - RNA, 21 nt, synthetic construct
  source 1..21: mol_type = other RNA; note = Description of Artificial Sequence: Synthetic oligonucleotide
tttgtttcttccaggtgtgtt

SEQ ID NO: 33139 - RNA, 21 nt, synthetic construct
  source 1..21: mol_type = other RNA; note = Description of Artificial Sequence: Synthetic oligonucleotide
ttttgtttcttccaggtgttt

SEQ ID NO: 33140 - RNA, 21 nt, synthetic construct
  source 1..21: mol_type = other RNA; note = Description of Artificial Sequence: Synthetic oligonucleotide
tctttgtttcttccaggtgtt

SEQ ID NO: 33141 - RNA, 21 nt, synthetic construct
  source 1..21: mol_type = other RNA; note = Description of Artificial Sequence: Synthetic oligonucleotide
tactttgtttcttccaggttt

SEQ ID NO: 33142 - RNA, 21 nt, synthetic construct
  source 1..21: mol_type = other RNA; note = Description of Artificial Sequence: Synthetic oligonucleotide
ttactttgtttcttccaggtt

SEQ ID NO: 33143 - RNA, 21 nt, synthetic construct
  source 1..21: mol_type = other RNA; note = Description of Artificial Sequence: Synthetic oligonucleotide
tctactttgtttcttccagtt

SEQ ID NO: 33144 - RNA, 21 nt, synthetic construct
  source 1..21: mol_type = other RNA; note = Description of Artificial Sequence: Synthetic oligonucleotide
tcctactttgtttcttccatt

SEQ ID NO: 33145 - RNA, 21 nt, synthetic construct
  source 1..21: mol_type = other RNA; note = Description of Artificial Sequence: Synthetic oligonucleotide
ttcctactttgtttcttcctt

SEQ ID NO: 33146 - RNA, 21 nt, synthetic construct
  source 1..21: mol_type = other RNA; note = Description of Artificial Sequence: Synthetic oligonucleotide
tttcctactttgtttcttctt

SEQ ID NO: 33147 - RNA, 21 nt, synthetic construct
  source 1..21: mol_type = other RNA; note = Description of Artificial Sequence: Synthetic oligonucleotide
ttttcctactttgtttctttt

SEQ ID NO: 33148 - RNA, 21 nt, synthetic construct
  source 1..21: mol_type = other RNA; note = Description of Artificial Sequence: Synthetic oligonucleotide
tttttcctactttgtttcttt

SEQ ID NO: 33149 - RNA, 21 nt, synthetic construct
  source 1..21: mol_type = other RNA; note = Description of Artificial Sequence: Synthetic oligonucleotide
ttttttcctactttgtttctt

SEQ ID NO: 33150 - RNA, 21 nt, synthetic construct
  source 1..21: mol_type = other RNA; note = Description of Artificial Sequence: Synthetic oligonucleotide
tctttttcctactttgttttt

SEQ ID NO: 33151 - RNA, 21 nt, synthetic construct
  source 1..21: mol_type = other RNA; note = Description of Artificial Sequence: Synthetic oligonucleotide
tactttttcctactttgtttt

SEQ ID NO: 33152 - RNA, 21 nt, synthetic construct
  source 1..21: mol_type = other RNA; note = Description of Artificial Sequence: Synthetic oligonucleotide
tcactttttcctactttgttt

SEQ ID NO: 33153 - RNA, 21 nt, synthetic construct
  source 1..21: mol_type = other RNA; note = Description of Artificial Sequence: Synthetic oligonucleotide
ttcactttttcctactttgtt

SEQ ID NO: 33154 - RNA, 21 nt, synthetic construct
  source 1..21: mol_type = other RNA; note = Description of Artificial Sequence: Synthetic oligonucleotide
tttcactttttcctacttttt

SEQ ID NO: 33155 - RNA, 21 nt, synthetic construct
  source 1..21: mol_type = other RNA; note = Description of Artificial Sequence: Synthetic oligonucleotide
tgttcactttttcctactttt

SEQ ID NO: 33156 - RNA, 21 nt, synthetic construct
  source 1..21: mol_type = other RNA; note = Description of Artificial Sequence: Synthetic oligonucleotide
ttgttcactttttcctacttt

SEQ ID NO: 33157 - RNA, 21 nt, synthetic construct
  source 1..21: mol_type = other RNA; note = Description of Artificial Sequence: Synthetic oligonucleotide
tctgttcactttttcctactt

SEQ ID NO: 33158 - RNA, 21 nt, synthetic construct
  source 1..21: mol_type = other RNA; note = Description of Artificial Sequence: Synthetic oligonucleotide
tcctgttcactttttcctatt

SEQ ID NO: 33159 - RNA, 21 nt, synthetic construct
  source 1..21: mol_type = other RNA; note = Description of Artificial Sequence: Synthetic oligonucleotide
tccctgttcactttttccttt

SEQ ID NO: 33160 - RNA, 21 nt, synthetic construct
  source 1..21: mol_type = other RNA; note = Description of Artificial Sequence: Synthetic oligonucleotide
tcccctgttcactttttcctt

SEQ ID NO: 33161 - RNA, 21 nt, synthetic construct
  source 1..21: mol_type = other RNA; note = Description of Artificial Sequence: Synthetic oligonucleotide
ttcccctgttcactttttctt

SEQ ID NO: 33162 - RNA, 21 nt, synthetic construct
  source 1..21: mol_type = other RNA; note = Description of Artificial Sequence: Synthetic oligonucleotide
tatcccctgttcacttttttt

SEQ ID NO: 33163 - RNA, 21 nt, synthetic construct
  source 1..21: mol_type = other RNA; note = Description of Artificial Sequence: Synthetic oligonucleotide
tcatcccctgttcactttttt

SEQ ID NO: 33164 - RNA, 21 nt, synthetic construct
  source 1..21: mol_type = other RNA; note = Description of Artificial Sequence: Synthetic oligonucleotide
tacatcccctgttcacttttt

SEQ ID NO: 33165 - RNA, 21 nt, synthetic construct
  source 1..21: mol_type = other RNA; note = Description of Artificial Sequence: Synthetic oligonucleotide
tgacatcccctgttcactttt

SEQ ID NO: 33166 - RNA, 21 nt, synthetic construct
  source 1..21: mol_type = other RNA; note = Description of Artificial Sequence: Synthetic oligonucleotide
ttgacatcccctgttcacttt

SEQ ID NO: 33167 - RNA, 21 nt, synthetic construct
  source 1..21: mol_type = other RNA; note = Description of Artificial Sequence: Synthetic oligonucleotide
tttgacatcccctgttcactt

SEQ ID NO: 33168 - RNA, 21 nt, synthetic construct
  source 1..21: mol_type = other RNA; note = Description of Artificial Sequence: Synthetic oligonucleotide
ttttgacatcccctgttcatt

SEQ ID NO: 33169 - RNA, 21 nt, synthetic construct
  source 1..21: mol_type = other RNA; note = Description of Artificial Sequence: Synthetic oligonucleotide
tatttgacatcccctgttctt

SEQ ID NO: 33170 - RNA, 21 nt, synthetic construct
  source 1..21: mol_type = other RNA; note = Description of Artificial Sequence: Synthetic oligonucleotide
tgatttgacatcccctgtttt

SEQ ID NO: 33171 - RNA, 21 nt, synthetic construct
  source 1..21: mol_type = other RNA; note = Description of Artificial Sequence: Synthetic oligonucleotide
tcgatttgacatcccctgttt

SEQ ID NO: 33172 - RNA, 21 nt, synthetic construct
  source 1..21: mol_type = other RNA; note = Description of Artificial Sequence: Synthetic oligonucleotide
ttcgatttgacatcccctgtt

SEQ ID NO: 33173 - RNA, 21 nt, synthetic construct
  source 1..21: mol_type = other RNA; note = Description of Artificial Sequence: Synthetic oligonucleotide
tatcgatttgacatccccttt

SEQ ID NO: 33174 - RNA, 21 nt, synthetic construct
  source 1..21: mol_type = other RNA; note = Description of Artificial Sequence: Synthetic oligonucleotide
taatcgatttgacatcccctt

SEQ ID NO: 33175 - RNA, 21 nt, synthetic construct
  source 1..21: mol_type = other RNA; note = Description of Artificial Sequence: Synthetic oligonucleotide
tgaatcgatttgacatccctt

SEQ ID NO: 33176 - RNA, 21 nt, synthetic construct
  source 1..21: mol_type = other RNA; note = Description of Artificial Sequence: Synthetic oligonucleotide
tagaatcgatttgacatcctt

SEQ ID NO: 33177 - RNA, 21 nt, synthetic construct
  source 1..21: mol_type = other RNA; note = Description of Artificial Sequence: Synthetic oligonucleotide
taagaatcgatttgacatctt

SEQ ID NO: 33178 - RNA, 21 nt, synthetic construct
  source 1..21: mol_type = other RNA; note = Description of Artificial Sequence: Synthetic oligonucleotide
tcaagaatcgatttgacattt

SEQ ID NO: 33179 - RNA, 21 nt, synthetic construct
  source 1..21: mol_type = other RNA; note = Description of Artificial Sequence: Synthetic oligonucleotide
ttcaagaatcgatttgacatt

SEQ ID NO: 33180 - RNA, 21 nt, synthetic construct
  source 1..21: mol_type = other RNA; note = Description of Artificial Sequence: Synthetic oligonucleotide
tttcaagaatcgatttgactt

SEQ ID NO: 33181 - RNA, 21 nt, synthetic construct
  source 1..21: mol_type = other RNA; note = Description of Artificial Sequence: Synthetic oligonucleotide
tattcaagaatcgatttgatt

SEQ ID NO: 33182 - RNA, 21 nt, synthetic construct
  source 1..21: mol_type = other RNA; note = Description of Artificial Sequence: Synthetic oligonucleotide
taattcaagaatcgatttgtt

SEQ ID NO: 33183 - RNA, 21 nt, synthetic construct
  source 1..21: mol_type = other RNA; note = Description of Artificial Sequence: Synthetic oligonucleotide
tgaattcaagaatcgattttt

SEQ ID NO: 33184 - RNA, 21 nt, synthetic construct
  source 1..21: mol_type = other RNA; note = Description of Artificial Sequence: Synthetic oligonucleotide
tggaattcaagaatcgatttt

SEQ ID NO: 33185 - RNA, 21 nt, synthetic construct
  source 1..21: mol_type = other RNA; note = Description of Artificial Sequence: Synthetic oligonucleotide
tgggaattcaagaatcgattt

SEQ ID NO: 33186 - RNA, 21 nt, synthetic construct
  source 1..21: mol_type = other RNA; note = Description of Artificial Sequence: Synthetic oligonucleotide
tcgggaattcaagaatcgatt

SEQ ID NO: 33187 - RNA, 21 nt, synthetic construct
  source 1..21: mol_type = other RNA; note = Description of Artificial Sequence: Synthetic oligonucleotide
tgcgggaattcaagaatcgtt

SEQ ID NO: 33188 - RNA, 21 nt, synthetic construct
  source 1..21: mol_type = other RNA; note = Description of Artificial Sequence: Synthetic oligonucleotide
tagcgggaattcaagaatctt

SEQ ID NO: 33189 - RNA, 21 nt, synthetic construct
  source 1..21: mol_type = other RNA; note = Description of Artificial Sequence: Synthetic oligonucleotide
tcagcgggaattcaagaattt

SEQ ID NO: 33190 - RNA, 21 nt, synthetic construct
  source 1..21: mol_type = other RNA; note = Description of Artificial Sequence: Synthetic oligonucleotide
tgcagcgggaattcaagaatt

SEQ ID NO: 33191 - RNA, 21 nt, synthetic construct
  source 1..21: mol_type = other RNA; note = Description of Artificial Sequence: Synthetic oligonucleotide
ttgcagcgggaattcaagatt

SEQ ID NO: 33192 - RNA, 21 nt, synthetic construct
  source 1..21: mol_type = other RNA; note = Description of Artificial Sequence: Synthetic oligonucleotide
tttgcagcgggaattcaagtt

SEQ ID NO: 33193 - RNA, 21 nt, synthetic construct
  source 1..21: mol_type = other RNA; note = Description of Artificial Sequence: Synthetic oligonucleotide
tcttgcagcgggaattcaatt

SEQ ID NO: 33194 - RNA, 21 nt, synthetic construct
  source 1..21: mol_type = other RNA; note = Description of Artificial Sequence: Synthetic oligonucleotide
tgcttgcagcgggaattcatt

SEQ ID NO: 33195 - RNA, 21 nt, synthetic construct
  source 1..21: mol_type = other RNA; note = Description of Artificial Sequence: Synthetic oligonucleotide
tagcttgcagcgggaattctt

SEQ ID NO: 33196 - RNA, 21 nt, synthetic construct
  source 1..21: mol_type = other RNA; note = Description of Artificial Sequence: Synthetic oligonucleotide
ttagcttgcagcgggaatttt

SEQ ID NO: 33197 - RNA, 21 nt, synthetic construct
  source 1..21: mol_type = other RNA; note = Description of Artificial Sequence: Synthetic oligonucleotide
tctagcttgcagcgggaattt

SEQ ID NO: 33198 - RNA, 21 nt, synthetic construct
  source 1..21: mol_type = other RNA; note = Description of Artificial Sequence: Synthetic oligonucleotide
ttctagcttgcagcgggaatt

SEQ ID NO: 33199 - RNA, 21 nt, synthetic construct
  source 1..21: mol_type = other RNA; note = Description of Artificial Sequence: Synthetic oligonucleotide
tctctagcttgcagcgggatt

SEQ ID NO: 33200 - RNA, 21 nt, synthetic construct
  source 1..21: mol_type = other RNA; note = Description of Artificial Sequence: Synthetic oligonucleotide
tgctctagcttgcagcgggtt

SEQ ID NO: 33201 - RNA, 21 nt, synthetic construct
  source 1..21: mol_type = other RNA; note = Description of Artificial Sequence: Synthetic oligonucleotide
tggctctagcttgcagcggtt

SEQ ID NO: 33202 - RNA, 21 nt, synthetic construct
  source 1..21: mol_type = other RNA; note = Description of Artificial Sequence: Synthetic oligonucleotide
tcggctctagcttgcagcgtt

SEQ ID NO: 33203 - RNA, 21 nt, synthetic construct
  source 1..21: mol_type = other RNA; note = Description of Artificial Sequence: Synthetic oligonucleotide
tgcggctctagcttgcagctt

SEQ ID NO: 33204 - RNA, 21 nt, synthetic construct
  source 1..21: mol_type = other RNA; note = Description of Artificial Sequence: Synthetic oligonucleotide
ttgcggctctagcttgcagtt

SEQ ID NO: 33205 - RNA, 21 nt, synthetic construct
  source 1..21: mol_type = other RNA; note = Description of Artificial Sequence: Synthetic oligonucleotide
tctgcggctctagcttgcatt

SEQ ID NO: 33206 - RNA, 21 nt, synthetic construct
  source 1..21: mol_type = other RNA; note = Description of Artificial Sequence: Synthetic oligonucleotide
tcctgcggctctagcttgctt

SEQ ID NO: 33207 - RNA, 21 nt, synthetic construct
  source 1..21: mol_type = other RNA; note = Description of Artificial Sequence: Synthetic oligonucleotide
tgcctgcggctctagcttgtt

SEQ ID NO: 33208 - RNA, 21 nt, synthetic construct
  source 1..21: mol_type = other RNA; note = Description of Artificial Sequence: Synthetic oligonucleotide
ttgcctgcggctctagctttt

SEQ ID NO: 33209 - RNA, 21 nt, synthetic construct
  source 1..21: mol_type = other RNA; note = Description of Artificial Sequence: Synthetic oligonucleotide
tgtgcctgcggctctagcttt

SEQ ID NO: 33210 - RNA, 21 nt, synthetic construct
  source 1..21: mol_type = other RNA; note = Description of Artificial Sequence: Synthetic oligonucleotide
tggtgcctgcggctctagctt

SEQ ID NO: 33211 - RNA, 21 nt, synthetic construct
  source 1..21: mol_type = other RNA; note = Description of Artificial Sequence: Synthetic oligonucleotide
tgggtgcctgcggctctagtt

SEQ ID NO: 33212 - RNA, 21 nt, synthetic construct
  source 1..21: mol_type = other RNA; note = Description of Artificial Sequence: Synthetic oligonucleotide
tagggtgcctgcggctctatt

SEQ ID NO: 33213 - RNA, 21 nt, synthetic construct
  source 1..21: mol_type = other RNA; note = Description of Artificial Sequence: Synthetic oligonucleotide
tgagggtgcctgcggctcttt

SEQ ID NO: 33214 - RNA, 21 nt, synthetic construct
  source 1..21: mol_type = other RNA; note = Description of Artificial Sequence: Synthetic oligonucleotide
tagagggtgcctgcggctctt

SEQ ID NO: 33215 - RNA, 21 nt, synthetic construct
  source 1..21: mol_type = other RNA; note = Description of Artificial Sequence: Synthetic oligonucleotide
tgagagggtgcctgcggcttt

SEQ ID NO: 33216 - RNA, 21 nt, synthetic construct
  source 1..21: mol_type = other RNA; note = Description of Artificial Sequence: Synthetic oligonucleotide
ttgagagggtgcctgcggctt

SEQ ID NO: 33217 - RNA, 21 nt, synthetic construct
  source 1..21: mol_type = other RNA; note = Description of Artificial Sequence: Synthetic oligonucleotide
tgtgagagggtgcctgcggtt

SEQ ID NO: 33218 - RNA, 21 nt, synthetic construct
  source 1..21: mol_type = other RNA; note = Description of Artificial Sequence: Synthetic oligonucleotide
tagtgagagggtgcctgcgtt

SEQ ID NO: 33219 - RNA, 21 nt, synthetic construct
  source 1..21: mol_type = other RNA; note = Description of Artificial Sequence: Synthetic oligonucleotide
tgagtgagagggtgcctgctt

SEQ ID NO: 33220 - RNA, 21 nt, synthetic construct
  source 1..21: mol_type = other RNA; note = Description of Artificial Sequence: Synthetic oligonucleotide
ttgagtgagagggtgcctgtt

SEQ ID NO: 33221 - RNA, 21 nt, synthetic construct
  source 1..21: mol_type = other RNA; note = Description of Artificial Sequence: Synthetic oligonucleotide
tttgagtgagagggtgccttt

SEQ ID NO: 33222 - RNA, 21 nt, synthetic construct
  source 1..21: mol_type = other RNA; note = Description of Artificial Sequence: Synthetic oligonucleotide
tattgagtgagagggtgcctt

SEQ ID NO: 33223 - RNA, 21 nt, synthetic construct
  source 1..21: mol_type = other RNA; note = Description of Artificial Sequence: Synthetic oligonucleotide
taattgagtgagagggtgctt

SEQ ID NO: 33224 - RNA, 21 nt, synthetic construct
  source 1..21: mol_type = other RNA; note = Description of Artificial Sequence: Synthetic oligonucleotide
taaattgagtgagagggtgtt

SEQ ID NO: 33225 - RNA, 21 nt, synthetic construct
  source 1..21: mol_type = other RNA; note = Description of Artificial Sequence: Synthetic oligonucleotide
tgaaattgagtgagagggttt

SEQ ID NO: 33226 - RNA, 21 nt, synthetic construct
  source 1..21: mol_type = other RNA; note = Description of Artificial Sequence: Synthetic oligonucleotide
tggaaattgagtgagagggtt

SEQ ID NO: 33227 - RNA, 21 nt, synthetic construct
  source 1..21: mol_type = other RNA; note = Description of Artificial Sequence: Synthetic oligonucleotide
ttggaaattgagtgagaggtt

SEQ ID NO: 33228 - RNA, 21 nt, synthetic construct
  source 1..21: mol_type = other RNA; note = Description of Artificial Sequence: Synthetic oligonucleotide
tgtggaaattgagtgagagtt

SEQ ID NO: 33229 - RNA, 21 nt, synthetic construct
  source 1..21: mol_type = other RNA; note = Description of Artificial Sequence: Synthetic oligonucleotide
tagtggaaattgagtgagatt

SEQ ID NO: 33230 - RNA, 21 nt, synthetic construct
  source 1..21: mol_type = other RNA; note = Description of Artificial Sequence: Synthetic oligonucleotide
tgagtggaaattgagtgagtt

SEQ ID NO: 33231 - RNA, 21 nt, synthetic construct
  source 1..21: mol_type = other RNA; note = Description of Artificial Sequence: Synthetic oligonucleotide
ttgagtggaaattgagtgatt

SEQ ID NO: 33232 - RNA, 21 nt, synthetic construct
  source 1..21: mol_type = other RNA; note = Description of Artificial Sequence: Synthetic oligonucleotide
tctgagtggaaattgagtgtt

SEQ ID NO: 33233 - RNA, 21 nt, synthetic construct
  source 1..21: mol_type = other RNA; note = Description of Artificial Sequence: Synthetic oligonucleotide
ttctgagtggaaattgagttt

SEQ ID NO: 33234 - RNA, 21 nt, synthetic construct
  source 1..21: mol_type = other RNA; note = Description of Artificial Sequence: Synthetic oligonucleotide
tttctgagtggaaattgagtt

SEQ ID NO: 33235 - RNA, 21 nt, synthetic construct
  source 1..21: mol_type = other RNA; note = Description of Artificial Sequence: Synthetic oligonucleotide
tgttctgagtggaaattgatt

SEQ ID NO: 33236 - RNA, 21 nt, synthetic construct
  source 1..21: mol_type = other RNA; note = Description of Artificial Sequence: Synthetic oligonucleotide
tggttctgagtggaaattgtt

SEQ ID NO: 33237 - RNA, 21 nt, synthetic construct
  source 1..21: mol_type = other RNA; note = Description of Artificial Sequence: Synthetic oligonucleotide
tgggttctgagtggaaatttt

SEQ ID NO: 33238 - RNA, 21 nt, synthetic construct
  source 1..21: mol_type = other RNA; note = Description of Artificial Sequence: Synthetic oligonucleotide
tagggttctgagtggaaattt

SEQ ID NO: 33239 - RNA, 21 nt, synthetic construct
  source 1..21: mol_type = other RNA; note = Description of Artificial Sequence: Synthetic oligonucleotide
ttagggttctgagtggaaatt

SEQ ID NO: 33240 - RNA, 21 nt, synthetic construct
  source 1..21: mol_type = other RNA; note = Description of Artificial Sequence: Synthetic oligonucleotide
tatagggttctgagtggaatt

SEQ ID NO: 33241 - RNA, 21 nt, synthetic construct
  source 1..21: mol_type = other RNA; note = Description of Artificial Sequence: Synthetic oligonucleotide
ttatagggttctgagtggatt

SEQ ID NO: 33242 - RNA, 21 nt, synthetic construct
  source 1..21: mol_type = other RNA; note = Description of Artificial Sequence: Synthetic oligonucleotide
tttatagggttctgagtggtt

SEQ ID NO: 33243 - RNA, 21 nt, synthetic construct
  source 1..21: mol_type = other RNA; note = Description of Artificial Sequence: Synthetic oligonucleotide
ttttatagggttctgagtgtt

SEQ ID NO: 33244 - RNA, 21 nt, synthetic construct
  source 1..21: mol_type = other RNA; note = Description of Artificial Sequence: Synthetic oligonucleotide
tgtttatagggttctgagttt

SEQ ID NO: 33245 - RNA, 21 nt, synthetic construct
  source 1..21: mol_type = other RNA; note = Description of Artificial Sequence: Synthetic oligonucleotide
ttgtttatagggttctgagtt

SEQ ID NO: 33246 - RNA, 21 nt, synthetic construct
  source 1..21: mol_type = other RNA; note = Description of Artificial Sequence: Synthetic oligonucleotide
tgtgtttatagggttctgatt

SEQ ID NO: 33247 - RNA, 21 nt, synthetic construct
  source 1..21: mol_type = other RNA; note = Description of Artificial Sequence: Synthetic oligonucleotide
tggtgtttatagggttctgtt

SEQ ID NO: 33248 - RNA, 21 nt, synthetic construct
  source 1..21: mol_type = other RNA; note = Description of Artificial Sequence: Synthetic oligonucleotide
ttggtgtttatagggttcttt

SEQ ID NO: 33249 - RNA, 21 nt, synthetic construct
  source 1..21: mol_type = other RNA; note = Description of Artificial Sequence: Synthetic oligonucleotide
tctggtgtttatagggttctt

SEQ ID NO: 33250 - RNA, 21 nt, synthetic construct
  source 1..21: mol_type = other RNA; note = Description of Artificial Sequence: Synthetic oligonucleotide
tactggtgtttatagggtttt

SEQ ID NO: 33251 - RNA, 21 nt, synthetic construct
  source 1..21: mol_type = other RNA; note = Description of Artificial Sequence: Synthetic oligonucleotide
tcactggtgtttatagggttt

SEQ ID NO: 33252 - RNA, 21 nt, synthetic construct
  source 1..21: mol_type = other RNA; note = Description of Artificial Sequence: Synthetic oligonucleotide
tccactggtgtttatagggtt

SEQ ID NO: 33253 - RNA, 21 nt, synthetic construct
  source 1..21: mol_type = other RNA; note = Description of Artificial Sequence: Synthetic oligonucleotide
tcccactggtgtttataggtt

SEQ ID NO: 33254 - RNA, 21 nt, synthetic construct
  source 1..21: mol_type = other RNA; note = Description of Artificial Sequence: Synthetic oligonucleotide
ttcccactggtgtttatagtt

SEQ ID NO: 33255 - RNA, 21 nt, synthetic construct
  source 1..21: mol_type = other RNA; note = Description of Artificial Sequence: Synthetic oligonucleotide
tttcccactggtgtttatatt

SEQ ID NO: 33256 - RNA, 21 nt, synthetic construct
  source 1..21: mol_type = other RNA; note = Description of Artificial Sequence: Synthetic oligonucleotide
tcttcccactggtgtttattt

SEQ ID NO: 33257 - RNA, 21 nt, synthetic construct
  source 1..21: mol_type = other RNA; note = Description of Artificial Sequence: Synthetic oligonucleotide
tccttcccactggtgtttatt

SEQ ID NO: 33258 - RNA, 21 nt, synthetic construct
  source 1..21: mol_type = other RNA; note = Description of Artificial Sequence: Synthetic oligonucleotide
tcccttcccactggtgttttt

SEQ ID NO: 33259 - RNA, 21 nt, synthetic construct
  source 1..21: mol_type = other RNA; note = Description of Artificial Sequence: Synthetic oligonucleotide
tgcccttcccactggtgtttt

SEQ ID NO: 33260 - RNA, 21 nt, synthetic construct
  source 1..21: mol_type = other RNA; note = Description of Artificial Sequence: Synthetic oligonucleotide
ttgcccttcccactggtgttt

SEQ ID NO: 33261 - RNA, 21 nt, synthetic construct
  source 1..21: mol_type = other RNA; note = Description of Artificial Sequence: Synthetic oligonucleotide
tttgcccttcccactggtgtt

SEQ ID NO: 33262 - RNA, 21 nt, synthetic construct
  source 1..21: mol_type = other RNA; note = Description of Artificial Sequence: Synthetic oligonucleotide
tgttgcccttcccactggttt

SEQ ID NO: 33263 - RNA, 21 nt, synthetic construct
  source 1..21: mol_type = other RNA; note = Description of Artificial Sequence: Synthetic oligonucleotide
tggttgcccttcccactggtt

SEQ ID NO: 33264 - RNA, 21 nt, synthetic construct
  source 1..21: mol_type = other RNA; note = Description of Artificial Sequence: Synthetic oligonucleotide
tgggttgcccttcccactgtt

SEQ ID NO: 33265 - RNA, 21 nt, synthetic construct
  source 1..21: mol_type = other RNA; note = Description of Artificial Sequence: Synthetic oligonucleotide
ttgggttgcccttcccacttt

SEQ ID NO: 33266 - RNA, 21 nt, synthetic construct
  source 1..21: mol_type = other RNA; note = Description of Artificial Sequence: Synthetic oligonucleotide
tgtgggttgcccttcccactt

SEQ ID NO: 33267 - RNA, 21 nt, synthetic construct
  source 1..21: mol_type = other RNA; note = Description of Artificial Sequence: Synthetic oligonucleotide
tagtgggttgcccttcccatt

SEQ ID NO: 33268 - RNA, 21 nt, synthetic construct
  source 1..21: mol_type = other RNA; note = Description of Artificial Sequence: Synthetic oligonucleotide
tcagtgggttgcccttccctt

SEQ ID NO: 33269 - RNA, 21 nt, synthetic construct
  source 1..21: mol_type = other RNA; note = Description of Artificial Sequence: Synthetic oligonucleotide
tgcagtgggttgcccttcctt

SEQ ID NO: 33270 - RNA, 21 nt, synthetic construct
  source 1..21: mol_type = other RNA; note = Description of Artificial Sequence: Synthetic oligonucleotide
ttgcagtgggttgcccttctt

SEQ ID NO: 33271 - RNA, 21 nt, synthetic construct
  source 1..21: mol_type = other RNA; note = Description of Artificial Sequence: Synthetic oligonucleotide
tgtgcagtgggttgccctttt

SEQ ID NO: 33272 - RNA, 21 nt, synthetic construct
  source 1..21: mol_type = other RNA; note = Description of Artificial Sequence: Synthetic oligonucleotide
tcgtgcagtgggttgcccttt

SEQ ID NO: 33273 - RNA, 21 nt, synthetic construct
  source 1..21: mol_type = other RNA; note = Description of Artificial Sequence: Synthetic oligonucleotide
tacgtgcagtgggttgccctt

SEQ ID NO: 33274 - RNA, 21 nt, synthetic construct
  source 1..21: mol_type = other RNA; note = Description of Artificial Sequence: Synthetic oligonucleotide
tcacgtgcagtgggttgcctt

SEQ ID NO: 33275 - RNA, 21 nt, synthetic construct
  source 1..21: mol_type = other RNA; note = Description of Artificial Sequence: Synthetic oligonucleotide
tccacgtgcagtgggttgctt

SEQ ID NO: 33276 - RNA, 21 nt, synthetic construct
  source 1..21: mol_type = other RNA; note = Description of Artificial Sequence: Synthetic oligonucleotide
tcccacgtgcagtgggttgtt

SEQ ID NO: 33277 - RNA, 21 nt, synthetic construct
  source 1..21: mol_type = other RNA; note = Description of Artificial Sequence: Synthetic oligonucleotide
ttcccacgtgcagtgggtttt

SEQ ID NO: 33278 - RNA, 21 nt, synthetic construct
  source 1..21: mol_type = other RNA; note = Description of Artificial Sequence: Synthetic oligonucleotide
tttcccacgtgcagtgggttt

SEQ ID NO: 33279 - RNA, 21 nt, synthetic construct
  source 1..21: mol_type = other RNA; note = Description of Artificial Sequence: Synthetic oligonucleotide
tattcccacgtgcagtgggtt

SEQ ID NO: 33280 - RNA, 21 nt, synthetic construct
  source 1..21: mol_type = other RNA; note = Description of Artificial Sequence: Synthetic oligonucleotide
tcattcccacgtgcagtggtt

SEQ ID NO: 33281 - RNA, 21 nt, synthetic construct
  source 1..21: mol_type = other RNA; note = Description of Artificial Sequence: Synthetic oligonucleotide
tgcattcccacgtgcagtgtt

SEQ ID NO: 33282 - RNA, 21 nt, synthetic construct
  source 1..21: mol_type = other RNA; note = Description of Artificial Sequence: Synthetic oligonucleotide
ttgcattcccacgtgcagttt

SEQ ID NO: 33283 - RNA, 21 nt, synthetic construct
  source 1..21: mol_type = other RNA; note = Description of Artificial Sequence: Synthetic oligonucleotide
tgtgcattcccacgtgcagtt

SEQ ID NO: 33284 - RNA, 21 nt, synthetic construct
  source 1..21: mol_type = other RNA; note = Description of Artificial Sequence: Synthetic oligonucleotide
tagtgcattcccacgtgcatt

SEQ ID NO: 33285 - RNA, 21 nt, synthetic construct
  source 1..21: mol_type = other RNA; note = Description of Artificial Sequence: Synthetic oligonucleotide
tcagtgcattcccacgtgctt

SEQ ID NO: 33286 - RNA, 21 nt, synthetic construct
  source 1..21: mol_type = other RNA; note = Description of Artificial Sequence: Synthetic oligonucleotide
ttcagtgcattcccacgtgtt

SEQ ID NO: 33287 - RNA, 21 nt, synthetic construct
  source 1..21: mol_type = other RNA; note = Description of Artificial Sequence: Synthetic oligonucleotide
tatcagtgcattcccacgttt

SEQ ID NO: 33288 - RNA, 21 nt, synthetic construct
  source 1..21: mol_type = other RNA; note = Description of Artificial Sequence: Synthetic oligonucleotide
taatcagtgcattcccacgtt

SEQ ID NO: 33289 - RNA, 21 nt, synthetic construct
  source 1..21: mol_type = other RNA; note = Description of Artificial Sequence: Synthetic oligonucleotide
taaatcagtgcattcccactt

SEQ ID NO: 33290 - RNA, 21 nt, synthetic construct
  source 1..21: mol_type = other RNA; note = Description of Artificial Sequence: Synthetic oligonucleotide
taaaatcagtgcattcccatt

SEQ ID NO: 33291 - RNA, 21 nt, synthetic construct
  source 1..21: mol_type = other RNA; note = Description of Artificial Sequence: Synthetic oligonucleotide
taaaaatcagtgcattccctt

SEQ ID NO: 33292 - RNA, 21 nt, synthetic construct
  source 1..21: mol_type = other RNA; note = Description of Artificial Sequence: Synthetic oligonucleotide
tgaaaaatcagtgcattcctt

SEQ ID NO: 33293 - RNA, 21 nt, synthetic construct
  source 1..21: mol_type = other RNA; note = Description of Artificial Sequence: Synthetic oligonucleotide
tggaaaaatcagtgcattctt

SEQ ID NO: 33294 - RNA, 21 nt, synthetic construct
  source 1..21: mol_type = other RNA; note = Description of Artificial Sequence: Synthetic oligonucleotide
taggaaaaatcagtgcatttt

SEQ ID NO: 33295 - RNA, 21 nt, synthetic construct
  source 1..21: mol_type = other RNA; note = Description of Artificial Sequence: Synthetic oligonucleotide
ttaggaaaaatcagtgcattt

SEQ ID NO: 33296 - RNA, 21 nt, synthetic construct
  source 1..21: mol_type = other RNA; note = Description of Artificial Sequence: Synthetic oligonucleotide
tctaggaaaaatcagtgcatt

SEQ ID NO: 33297 - RNA, 21 nt, synthetic construct
  source 1..21: mol_type = other RNA; note = Description of Artificial Sequence: Synthetic oligonucleotide
tcctaggaaaaatcagtgctt

SEQ ID NO: 33298 - RNA, 21 nt, synthetic construct
  source 1..21: mol_type = other RNA; note = Description of Artificial Sequence: Synthetic oligonucleotide
ttcctaggaaaaatcagtgtt

SEQ ID NO: 33299 - RNA, 21 nt, synthetic construct
  source 1..21: mol_type = other RNA; note = Description of Artificial Sequence: Synthetic oligonucleotide
tctcctaggaaaaatcagttt

SEQ ID NO: 33300 - RNA, 21 nt, synthetic construct
  source 1..21: mol_type = other RNA; note = Description of Artificial Sequence: Synthetic oligonucleotide
tactcctaggaaaaatcagtt

SEQ ID NO: 33301 - RNA, 21 nt, synthetic construct
  source 1..21: mol_type = other RNA; note = Description of Artificial Sequence: Synthetic oligonucleotide
ttactcctaggaaaaatcatt

SEQ ID NO: 33302 - RNA, 21 nt, synthetic construct
  source 1..21: mol_type = other RNA; note = Description of Artificial Sequence: Synthetic oligonucleotide
tctactcctaggaaaaatctt

SEQ ID NO: 33303 - RNA, 21 nt, synthetic construct
  source 1..21: mol_type = other RNA; note = Description of Artificial Sequence: Synthetic oligonucleotide
ttctactcctaggaaaaattt

SEQ ID NO: 33304 - RNA, 21 nt, synthetic construct
  source 1..21: mol_type = other RNA; note = Description of Artificial Sequence: Synthetic oligonucleotide
tgtctactcctaggaaaaatt

SEQ ID NO: 33305 - RNA, 21 nt, synthetic construct
  source 1..21: mol_type = other RNA; note = Description of Artificial Sequence: Synthetic oligonucleotide
ttgtctactcctaggaaaatt

SEQ ID NO: 33306 - RNA, 21 nt, synthetic construct
  source 1..21: mol_type = other RNA; note = Description of Artificial Sequence: Synthetic oligonucleotide
tatgtctactcctaggaaatt

SEQ ID NO: 33307 - RNA, 21 nt, synthetic construct
  source 1..21: mol_type = other RNA; note = Description of Artificial Sequence: Synthetic oligonucleotide
tcatgtctactcctaggaatt

SEQ ID NO: 33308 - RNA, 21 nt, synthetic construct
  source 1..21: mol_type = other RNA; note = Description of Artificial Sequence: Synthetic oligonucleotide
tacatgtctactcctaggatt

SEQ ID NO: 33309 - RNA, 21 nt, synthetic construct
  source 1..21: mol_type = other RNA; note = Description of Artificial Sequence: Synthetic oligonucleotide
taacatgtctactcctaggtt

SEQ ID NO: 33310 - RNA, 21 nt, synthetic construct
  source 1..21: mol_type = other RNA; note = Description of Artificial Sequence: Synthetic oligonucleotide
tgaacatgtctactcctagtt

SEQ ID NO: 33311 - RNA, 21 nt, synthetic construct
  source 1..21: mol_type = other RNA; note = Description of Artificial Sequence: Synthetic oligonucleotide
tggaacatgtctactcctatt

SEQ ID NO: 33312 - RNA, 21 nt, synthetic construct
  source 1..21: mol_type = other RNA; note = Description of Artificial Sequence: Synthetic oligonucleotide
taggaacatgtctactccttt

SEQ ID NO: 33313 - RNA, 21 nt, synthetic construct
  source 1..21: mol_type = other RNA; note = Description of Artificial Sequence: Synthetic oligonucleotide
tgaggaacatgtctactcctt

SEQ ID NO: 33314 - RNA, 21 nt, synthetic construct
  source 1..21: mol_type = other RNA; note = Description of Artificial Sequence: Synthetic oligonucleotide
tagaggaacatgtctactctt

SEQ ID NO: 33315 - RNA, 21 nt, synthetic construct
  source 1..21: mol_type = other RNA; note = Description of Artificial Sequence: Synthetic oligonucleotide
ttagaggaacatgtctacttt

SEQ ID NO: 33316 - RNA, 21 nt, synthetic construct
  source 1..21: mol_type = other RNA; note = Description of Artificial Sequence: Synthetic oligonucleotide
tttagaggaacatgtctactt

SEQ ID NO: 33317 - RNA, 21 nt, synthetic construct
  source 1..21: mol_type = other RNA; note = Description of Artificial Sequence: Synthetic oligonucleotide
tattagaggaacatgtctatt

SEQ ID NO: 33318 - RNA, 21 nt, synthetic construct
  source 1..21: mol_type = other RNA; note = Description of Artificial Sequence: Synthetic oligonucleotide
taattagaggaacatgtcttt

SEQ ID NO: 33319 - RNA, 21 nt, synthetic construct
  source 1..21: mol_type = other RNA; note = Description of Artificial Sequence: Synthetic oligonucleotide
ttaattagaggaacatgtctt

SEQ ID NO: 33320 - RNA, 21 nt, synthetic construct
  source 1..21: mol_type = other RNA; note = Description of Artificial Sequence: Synthetic oligonucleotide
tgtaattagaggaacatgttt

SEQ ID NO: 33321 - RNA, 21 nt, synthetic construct
  source 1..21: mol_type = other RNA; note = Description of Artificial Sequence: Synthetic oligonucleotide
tagtaattagaggaacatgtt

SEQ ID NO: 33322 - RNA, 21 nt, synthetic construct
  source 1..21: mol_type = other RNA; note = Description of Artificial Sequence: Synthetic oligonucleotide
tgagtaattagaggaacattt

SEQ ID NO: 33323 - RNA, 21 nt, synthetic construct
  source 1..21: mol_type = other RNA; note = Description of Artificial Sequence: Synthetic oligonucleotide
tggagtaattagaggaacatt

SEQ ID NO: 33324 - RNA, 21 nt, synthetic construct
  source 1..21: mol_type = other RNA; note = Description of Artificial Sequence: Synthetic oligonucleotide
tgggagtaattagaggaactt

SEQ ID NO: 33325 - RNA, 21 nt, synthetic construct
  source 1..21: mol_type = other RNA; note = Description of Artificial Sequence: Synthetic oligonucleotide
tagggagtaattagaggaatt

SEQ ID NO: 33326 - RNA, 21 nt, synthetic construct
  source 1..21: mol_type = other RNA; note = Description of Artificial Sequence: Synthetic oligonucleotide
tcagggagtaattagaggatt

SEQ ID NO: 33327 - RNA, 21 nt, synthetic construct
  source 1..21: mol_type = other RNA; note = Description of Artificial Sequence: Synthetic oligonucleotide
ttcagggagtaattagaggtt

SEQ ID NO: 33328 - RNA, 21 nt, synthetic construct
  source 1..21: mol_type = other RNA; note = Description of Artificial Sequence: Synthetic oligonucleotide
tctcagggagtaattagagtt

SEQ ID NO: 33329 - RNA, 21 nt, synthetic construct
  source 1..21: mol_type = other RNA; note = Description of Artificial Sequence: Synthetic oligonucleotide
tcctcagggagtaattagatt

SEQ ID NO: 33330 - RNA, 21 nt, synthetic construct
  source 1..21: mol_type = other RNA; note = Description of Artificial Sequence: Synthetic oligonucleotide
tccctcagggagtaattagtt

SEQ ID NO: 33331 - RNA, 21 nt, synthetic construct
  source 1..21: mol_type = other RNA; note = Description of Artificial Sequence: Synthetic oligonucleotide
taccctcagggagtaattatt

SEQ ID NO: 33332 - RNA, 21 nt, synthetic construct
  source 1..21: mol_type = other RNA; note = Description of Artificial Sequence: Synthetic oligonucleotide
taaccctcagggagtaatttt

SEQ ID NO: 33333 - RNA, 21 nt, synthetic construct
  source 1..21: mol_type = other RNA; note = Description of Artificial Sequence: Synthetic oligonucleotide
ttaaccctcagggagtaattt

SEQ ID NO: 33334 - RNA, 21 nt, synthetic construct
  source 1..21: mol_type = other RNA; note = Description of Artificial Sequence: Synthetic oligonucleotide
tctaaccctcagggagtaatt

SEQ ID NO: 33335 - RNA, 21 nt, synthetic construct
  source 1..21: mol_type = other RNA; note = Description of Artificial Sequence: Synthetic oligonucleotide
tactaaccctcagggagtatt

SEQ ID NO: 33336 - RNA, 21 nt, synthetic construct
  source 1..21: mol_type = other RNA; note = Description of Artificial Sequence: Synthetic oligonucleotide
taactaaccctcagggagttt

SEQ ID NO: 33337 - RNA, 21 nt, synthetic construct
  source 1..21: mol_type = other RNA; note = Description of Artificial Sequence: Synthetic oligonucleotide
tcaactaaccctcagggagtt

SEQ ID NO: 33338 - RNA, 21 nt, synthetic construct
  source 1..21: mol_type = other RNA; note = Description of Artificial Sequence: Synthetic oligonucleotide
tccaactaaccctcagggatt

SEQ ID NO: 33339 - RNA, 21 nt, synthetic construct
  source 1..21: mol_type = other RNA; note = Description of Artificial Sequence: Synthetic oligonucleotide
tcccaactaaccctcagggtt

SEQ ID NO: 33340 - RNA, 21 nt, synthetic construct
  source 1..21: mol_type = other RNA; note = Description of Artificial Sequence: Synthetic oligonucleotide
tccccaactaaccctcaggtt

SEQ ID NO: 33341 - RNA, 21 nt, synthetic construct
  source 1..21: mol_type = other RNA; note = Description of Artificial Sequence: Synthetic oligonucleotide
tgccccaactaaccctcagtt

SEQ ID NO: 33342 - RNA, 21 nt, synthetic construct
  source 1..21: mol_type = other RNA; note = Description of Artificial Sequence: Synthetic oligonucleotide
tagccccaactaaccctcatt

SEQ ID NO: 33343 - RNA, 21 nt, synthetic construct
  source 1..21: mol_type = other RNA; note = Description of Artificial Sequence: Synthetic oligonucleotide
ttagccccaactaaccctctt

SEQ ID NO: 33344 - RNA, 21 nt, synthetic construct
  source 1..21: mol_type = other RNA; note = Description of Artificial Sequence: Synthetic oligonucleotide
tttagccccaactaacccttt

SEQ ID NO: 33345 - RNA, 21 nt, synthetic construct
  source 1..21: mol_type = other RNA; note = Description of Artificial Sequence: Synthetic oligonucleotide
ttttagccccaactaaccctt

SEQ ID NO: 33346 - RNA, 21 nt, synthetic construct
  source 1..21: mol_type = other RNA; note = Description of Artificial Sequence: Synthetic oligonucleotide
tgtttagccccaactaacctt

SEQ ID NO: 33347 - RNA, 21 nt, synthetic construct
  source 1..21: mol_type = other RNA; note = Description of Artificial Sequence: Synthetic oligonucleotide
tggtttagccccaactaactt

SEQ ID NO: 33348 - RNA, 21 nt, synthetic construct
  source 1..21: mol_type = other RNA; note = Description of Artificial Sequence: Synthetic oligonucleotide
ttggtttagccccaactaatt

SEQ ID NO: 33349 - RNA, 21 nt, synthetic construct
  source 1..21: mol_type = other RNA; note = Description of Artificial Sequence: Synthetic oligonucleotide
tatggtttagccccaactatt

SEQ ID NO: 33350 - RNA, 21 nt, synthetic construct
  source 1..21: mol_type = other RNA; note = Description of Artificial Sequence: Synthetic oligonucleotide
tcatggtttagccccaacttt

SEQ ID NO: 33351 - RNA, 21 nt, synthetic construct
  source 1..21: mol_type = other RNA; note = Description of Artificial Sequence: Synthetic oligonucleotide
ttcatggtttagccccaactt

SEQ ID NO: 33352 - RNA, 21 nt, synthetic construct
  source 1..21: mol_type = other RNA; note = Description of Artificial Sequence: Synthetic oligonucleotide
tgtcatggtttagccccaatt

SEQ ID NO: 33353 - RNA, 21 nt, synthetic construct
  source 1..21: mol_type = other RNA; note = Description of Artificial Sequence: Synthetic oligonucleotide
ttgtcatggtttagccccatt

SEQ ID NO: 33354 - RNA, 21 nt, synthetic construct
  source 1..21: mol_type = other RNA; note = Description of Artificial Sequence: Synthetic oligonucleotide
tctgtcatggtttagcccctt

SEQ ID NO: 33355 - RNA, 21 nt, synthetic construct
  source 1..21: mol_type = other RNA; note = Description of Artificial Sequence: Synthetic oligonucleotide
ttctgtcatggtttagccctt

SEQ ID NO: 33356 - RNA, 21 nt, synthetic construct
  source 1..21: mol_type = other RNA; note = Description of Artificial Sequence: Synthetic oligonucleotide
tttctgtcatggtttagcctt

SEQ ID NO: 33357 - RNA, 21 nt, synthetic construct
  source 1..21: mol_type = other RNA; note = Description of Artificial Sequence: Synthetic oligonucleotide
tcttctgtcatggtttagctt

SEQ ID NO: 33358 - RNA, 21 nt, synthetic construct
  source 1..21: mol_type = other RNA; note = Description of Artificial Sequence: Synthetic oligonucleotide
tacttctgtcatggtttagtt

SEQ ID NO: 33359 - RNA, 21 nt, synthetic construct
  source 1..21: mol_type = other RNA; note = Description of Artificial Sequence: Synthetic oligonucleotide
tcacttctgtcatggtttatt

SEQ ID NO: 33360 - RNA, 21 nt, synthetic construct
  source 1..21: mol_type = other RNA; note = Description of Artificial Sequence: Synthetic oligonucleotide
tccacttctgtcatggttttt

SEQ ID NO: 33361 - RNA, 21 nt, synthetic construct
  source 1..21: mol_type = other RNA; note = Description of Artificial Sequence: Synthetic oligonucleotide
tcccacttctgtcatggtttt

SEQ ID NO: 33362 - RNA, 21 nt, synthetic construct
  source 1..21: mol_type = other RNA; note = Description of Artificial Sequence: Synthetic oligonucleotide
tccccacttctgtcatggttt

SEQ ID NO: 33363 - RNA, 21 nt, synthetic construct
  source 1..21: mol_type = other RNA; note = Description of Artificial Sequence: Synthetic oligonucleotide
ttccccacttctgtcatggtt

SEQ ID NO: 33364 - RNA, 21 nt, synthetic construct
  source 1..21: mol_type = other RNA; note = Description of Artificial Sequence: Synthetic oligonucleotide
tttccccacttctgtcatgtt

SEQ ID NO: 33365 - RNA, 21 nt, synthetic construct
  source 1..21: mol_type = other RNA; note = Description of Artificial Sequence: Synthetic oligonucleotide
tcttccccacttctgtcattt

SEQ ID NO: 33366 - RNA, 21 nt, synthetic construct
  source 1..21: mol_type = other RNA; note = Description of Artificial Sequence: Synthetic oligonucleotide
tacttccccacttctgtcatt

SEQ ID NO: 33367 - RNA, 21 nt, synthetic construct
  source 1..21: mol_type = other RNA; note = Description of Artificial Sequence: Synthetic oligonucleotide
taacttccccacttctgtctt

SEQ ID NO: 33368 - RNA, 21 nt, synthetic construct
  source 1..21: mol_type = other RNA; note = Description of Artificial Sequence: Synthetic oligonucleotide
tgaacttccccacttctgttt

SEQ ID NO: 33369 - RNA, 21 nt, synthetic construct
  source 1..21: mol_type = other RNA; note = Description of Artificial Sequence: Synthetic oligonucleotide
ttgaacttccccacttctgtt

SEQ ID NO: 33370 - RNA, 21 nt, synthetic construct
  source 1..21: mol_type = other RNA; note = Description of Artificial Sequence: Synthetic oligonucleotide
tttgaacttccccacttcttt

SEQ ID NO: 33371 - RNA, 21 nt, synthetic construct
  source 1..21: mol_type = other RNA; note = Description of Artificial Sequence: Synthetic oligonucleotide
tattgaacttccccacttctt

SEQ ID NO: 33372 - RNA, 21 nt, synthetic construct
  source 1..21: mol_type = other RNA; note = Description of Artificial Sequence: Synthetic oligonucleotide
tcattgaacttccccactttt

SEQ ID NO: 33373 - RNA, 21 nt, synthetic construct
  source 1..21: mol_type = other RNA; note = Description of Artificial Sequence: Synthetic oligonucleotide
tacattgaacttccccacttt

SEQ ID NO: 33374 - RNA, 21 nt, synthetic construct
  source 1..21: mol_type = other RNA; note = Description of Artificial Sequence: Synthetic oligonucleotide
tgacattgaacttccccactt

SEQ ID NO: 33375 - RNA, 21 nt, synthetic construct
  source 1..21: mol_type = other RNA; note = Description of Artificial Sequence: Synthetic oligonucleotide
tggacattgaacttccccatt

SEQ ID NO: 33376 - RNA, 21 nt, synthetic construct
  source 1..21: mol_type = other RNA; note = Description of Artificial Sequence: Synthetic oligonucleotide
taggacattgaacttcccctt

SEQ ID NO: 33377 - RNA, 21 nt, synthetic construct
  source 1..21: mol_type = other RNA; note = Description of Artificial Sequence: Synthetic oligonucleotide
taaggacattgaacttccctt

SEQ ID NO: 33378 - RNA, 21 nt, synthetic construct
  source 1..21: mol_type = other RNA; note = Description of Artificial Sequence: Synthetic oligonucleotide
ttaaggacattgaacttcctt

SEQ ID NO: 33379 - RNA, 21 nt, synthetic construct
  source 1..21: mol_type = other RNA; note = Description of Artificial Sequence: Synthetic oligonucleotide
tttaaggacattgaacttctt

SEQ ID NO: 33380 - RNA, 21 nt, synthetic construct
  source 1..21: mol_type = other RNA; note = Description of Artificial Sequence: Synthetic oligonucleotide
ttttaaggacattgaactttt

SEQ ID NO: 33381 - RNA, 21 nt, synthetic construct
  source 1..21: mol_type = other RNA; note = Description of Artificial Sequence: Synthetic oligonucleotide
tatttaaggacattgaacttt

SEQ ID NO: 33382 - RNA, 21 nt, synthetic construct
  source 1..21: mol_type = other RNA; note = Description of Artificial Sequence: Synthetic oligonucleotide
tgatttaaggacattgaactt

SEQ ID NO: 33383 - RNA, 21 nt, synthetic construct
  source 1..21: mol_type = other RNA; note = Description of Artificial Sequence: Synthetic oligonucleotide
tggatttaaggacattgaatt

SEQ ID NO: 33384 - RNA, 21 nt, synthetic construct
  source 1..21: mol_type = other RNA; note = Description of Artificial Sequence: Synthetic oligonucleotide
ttggatttaaggacattgatt

SEQ ID NO: 33385 - RNA, 21 nt, synthetic construct
  source 1..21: mol_type = other RNA; note = Description of Artificial Sequence: Synthetic oligonucleotide
tatggatttaaggacattgtt

SEQ ID NO: 33386 - RNA, 21 nt, synthetic construct
  source 1..21: mol_type = other RNA; note = Description of Artificial Sequence: Synthetic oligonucleotide
tgatggatttaaggacatttt

SEQ ID NO: 33387 - RNA, 21 nt, synthetic construct
  source 1..21: mol_type = other RNA; note = Description of Artificial Sequence: Synthetic oligonucleotide
tagatggatttaaggacattt

SEQ ID NO: 33388 - RNA, 21 nt, synthetic construct
  source 1..21: mol_type = other RNA; note = Description of Artificial Sequence: Synthetic oligonucleotide
taagatggatttaaggacatt

SEQ ID NO: 33389 - RNA, 21 nt, synthetic construct
  source 1..21: mol_type = other RNA; note = Description of Artificial Sequence: Synthetic oligonucleotide
ttaagatggatttaaggactt

SEQ ID NO: 33390 - RNA, 21 nt, synthetic construct
  source 1..21: mol_type = other RNA; note = Description of Artificial Sequence: Synthetic oligonucleotide
tgtaagatggatttaaggatt

SEQ ID NO: 33391 - RNA, 21 nt, synthetic construct
  source 1..21: mol_type = other RNA; note = Description of Artificial Sequence: Synthetic oligonucleotide
tagtaagatggatttaaggtt

SEQ ID NO: 33392 - RNA, 21 nt, synthetic construct
  source 1..21: mol_type = other RNA; note = Description of Artificial Sequence: Synthetic oligonucleotide
taagtaagatggatttaagtt

SEQ ID NO: 33393 - RNA, 21 nt, synthetic construct
  source 1..21: mol_type = other RNA; note = Description of Artificial Sequence: Synthetic oligonucleotide
tcaagtaagatggatttaatt

SEQ ID NO: 33394 - RNA, 21 nt, synthetic construct
  source 1..21: mol_type = other RNA; note = Description of Artificial Sequence: Synthetic oligonucleotide
tgcaagtaagatggatttatt

SEQ ID NO: 33395 - RNA, 21 nt, synthetic construct
  source 1..21: mol_type = other RNA; note = Description of Artificial Sequence: Synthetic oligonucleotide
tggcaagtaagatggattttt

SEQ ID NO: 33396 - RNA, 21 nt, synthetic construct
  source 1..21: mol_type = other RNA; note = Description of Artificial Sequence: Synthetic oligonucleotide
ttggcaagtaagatggatttt

SEQ ID NO: 33397 - RNA, 21 nt, synthetic construct
  source 1..21: mol_type = other RNA; note = Description of Artificial Sequence: Synthetic oligonucleotide
tttggcaagtaagatggattt

SEQ ID NO: 33398 - RNA, 21 nt, synthetic construct
  source 1..21: mol_type = other RNA; note = Description of Artificial Sequence: Synthetic oligonucleotide
tgttggcaagtaagatggatt

SEQ ID NO: 33399 - RNA, 21 nt, synthetic construct
  source 1..21: mol_type = other RNA; note = Description of Artificial Sequence: Synthetic oligonucleotide
ttgttggcaagtaagatggtt

SEQ ID NO: 33400 - RNA, 21 nt, synthetic construct
  source 1..21: mol_type = other RNA; note = Description of Artificial Sequence: Synthetic oligonucleotide
tctgttggcaagtaagatgtt

SEQ ID NO: 33401 - RNA, 21 nt, synthetic construct
  source 1..21: mol_type = other RNA; note = Description of Artificial Sequence: Synthetic oligonucleotide
tcctgttggcaagtaagattt

SEQ ID NO: 33402 - RNA, 21 nt, synthetic construct
  source 1..21: mol_type = other RNA; note = Description of Artificial Sequence: Synthetic oligonucleotide
tacctgttggcaagtaagatt

SEQ ID NO: 33403 - RNA, 21 nt, synthetic construct
  source 1..21: mol_type = other RNA; note = Description of Artificial Sequence: Synthetic oligonucleotide
ttacctgttggcaagtaagtt

SEQ ID NO: 33404 - RNA, 21 nt, synthetic construct
  source 1..21: mol_type = other RNA; note = Description of Artificial Sequence: Synthetic oligonucleotide
tttacctgttggcaagtaatt

SEQ ID NO: 33405 - RNA, 21 nt, synthetic construct
  source 1..21: mol_type = other RNA; note = Description of Artificial Sequence: Synthetic oligonucleotide
tcttacctgttggcaagtatt

SEQ ID NO: 33406 - RNA, 21 nt, synthetic construct
  source 1..21: mol_type = other RNA; note = Description of Artificial Sequence: Synthetic oligonucleotide
ttcttacctgttggcaagttt

SEQ ID NO: 33407 - RNA, 21 nt, synthetic construct
  source 1..21: mol_type = other RNA; note = Description of Artificial Sequence: Synthetic oligonucleotide
tctcttacctgttggcaagtt

SEQ ID NO: 33408 - RNA, 21 nt, synthetic construct
  source 1..21: mol_type = other RNA; note = Description of Artificial Sequence: Synthetic oligonucleotide
tcctcttacctgttggcaatt

SEQ ID NO: 33409 - RNA, 21 nt, synthetic construct
  source 1..21: mol_type = other RNA; note = Description of Artificial Sequence: Synthetic oligonucleotide
ttcctcttacctgttggcatt

SEQ ID NO: 33410 - RNA, 21 nt, synthetic construct
  source 1..21: mol_type = other RNA; note = Description of Artificial Sequence: Synthetic oligonucleotide
tttcctcttacctgttggctt

SEQ ID NO: 33411 - RNA, 21 nt, synthetic construct
  source 1..21: mol_type = other RNA; note = Description of Artificial Sequence: Synthetic oligonucleotide
tcttcctcttacctgttggtt

SEQ ID NO: 33412 - RNA, 21 nt, synthetic construct
  source 1..21: mol_type = other RNA; note = Description of Artificial Sequence: Synthetic oligonucleotide
tgcttcctcttacctgttgtt

SEQ ID NO: 33413 - RNA, 21 nt, synthetic construct
  source 1..21: mol_type = other RNA; note = Description of Artificial Sequence: Synthetic oligonucleotide
tagcttcctcttacctgtttt

SEQ ID NO: 33414 - RNA, 21 nt, synthetic construct
  source 1..21: mol_type = other RNA; note = Description of Artificial Sequence: Synthetic oligonucleotide
taagcttcctcttacctgttt

SEQ ID NO: 33415 - RNA, 21 nt, synthetic construct
  source 1..21: mol_type = other RNA; note = Description of Artificial Sequence: Synthetic oligonucleotide
ttaagcttcctcttacctgtt

SEQ ID NO: 33416 - RNA, 21 nt, synthetic construct
  source 1..21: mol_type = other RNA; note = Description of Artificial Sequence: Synthetic oligonucleotide
tgtaagcttcctcttaccttt

SEQ ID NO: 33417 - RNA, 21 nt, synthetic construct
  source 1..21: mol_type = other RNA; note = Description of Artificial Sequence: Synthetic oligonucleotide
ttgtaagcttcctcttacctt

SEQ ID NO: 33418 - RNA, 21 nt, synthetic construct
  source 1..21: mol_type = other RNA; note = Description of Artificial Sequence: Synthetic oligonucleotide
tatgtaagcttcctcttactt

SEQ ID NO: 33419 - RNA, 21 nt, synthetic construct
  source 1..21: mol_type = other RNA; note = Description of Artificial Sequence: Synthetic oligonucleotide
taatgtaagcttcctcttatt

SEQ ID NO: 33420 - RNA, 21 nt, synthetic construct
  source 1..21: mol_type = other RNA; note = Description of Artificial Sequence: Synthetic oligonucleotide
ttaatgtaagcttcctctttt

SEQ ID NO: 33421 - RNA, 21 nt, synthetic construct
  source 1..21: mol_type = other RNA; note = Description of Artificial Sequence: Synthetic oligonucleotide
tgtaatgtaagcttcctcttt

SEQ ID NO: 33422 - RNA, 21 nt, synthetic construct
  source 1..21: mol_type = other RNA; note = Description of Artificial Sequence: Synthetic oligonucleotide
ttgtaatgtaagcttcctctt

SEQ ID NO: 33423 - RNA, 21 nt, synthetic construct
  source 1..21: mol_type = other RNA; note = Description of Artificial Sequence: Synthetic oligonucleotide
tatgtaatgtaagcttccttt

SEQ ID NO: 33424 - RNA, 21 nt, synthetic construct
  source 1..21: mol_type = other RNA; note = Description of Artificial Sequence: Synthetic oligonucleotide
tcatgtaatgtaagcttcctt

SEQ ID NO: 33425 - RNA, 21 nt, synthetic construct
  source 1..21: mol_type = other RNA; note = Description of Artificial Sequence: Synthetic oligonucleotide
tacatgtaatgtaagcttctt

SEQ ID NO: 33426 - RNA, 21 nt, synthetic construct
  source 1..21: mol_type = other RNA; note = Description of Artificial Sequence: Synthetic oligonucleotide
tgacatgtaatgtaagctttt

SEQ ID NO: 33427 - RNA, 21 nt, synthetic construct
  source 1..21: mol_type = other RNA; note = Description of Artificial Sequence: Synthetic oligonucleotide
tggacatgtaatgtaagcttt

SEQ ID NO: 33428 - RNA, 21 nt, synthetic construct
  source 1..21: mol_type = other RNA; note = Description of Artificial Sequence: Synthetic oligonucleotide
ttggacatgtaatgtaagctt

SEQ ID NO: 33429 - RNA, 21 nt, synthetic construct
  source 1..21: mol_type = other RNA; note = Description of Artificial Sequence: Synthetic oligonucleotide
tctggacatgtaatgtaagtt

SEQ ID NO: 33430 - RNA, 21 nt, synthetic construct
  source 1..21: mol_type = other RNA; note = Description of Artificial Sequence: Synthetic oligonucleotide
tactggacatgtaatgtaatt

SEQ ID NO: 33431 - RNA, 21 nt, synthetic construct
  source 1..21: mol_type = other RNA; note = Description of Artificial Sequence: Synthetic oligonucleotide
tgactggacatgtaatgtatt

SEQ ID NO: 33432 - RNA, 21 nt, synthetic construct
  source 1..21: mol_type = other RNA; note = Description of Artificial Sequence: Synthetic oligonucleotide
tggactggacatgtaatgttt

SEQ ID NO: 33433 - RNA, 21 nt, synthetic construct
  source 1..21: mol_type = other RNA; note = Description of Artificial Sequence: Synthetic oligonucleotide
ttggactggacatgtaatgtt

SEQ ID NO: 33434 - RNA, 21 nt, synthetic construct
  source 1..21: mol_type = other RNA; note = Description of Artificial Sequence: Synthetic oligonucleotide
tgtggactggacatgtaattt

SEQ ID NO: 33435 - RNA, 21 nt, synthetic construct
  source 1..21: mol_type = other RNA; note = Description of Artificial Sequence: Synthetic oligonucleotide
ttgtggactggacatgtaatt

SEQ ID NO: 33436 - RNA, 21 nt, synthetic construct
  source 1..21: mol_type = other RNA; note = Description of Artificial Sequence: Synthetic oligonucleotide
tatgtggactggacatgtatt

SEQ ID NO: 33437 - RNA, 21 nt, synthetic construct
  source 1..21: mol_type = other RNA; note = Description of Artificial Sequence: Synthetic oligonucleotide
taatgtggactggacatgttt

SEQ ID NO: 33438 - RNA, 21 nt, synthetic construct
  source 1..21: mol_type = other RNA; note = Description of Artificial Sequence: Synthetic oligonucleotide
taaatgtggactggacatgtt

SEQ ID NO: 33439 - RNA, 21 nt, synthetic construct
  source 1..21: mol_type = other RNA; note = Description of Artificial Sequence: Synthetic oligonucleotide
ttaaatgtggactggacattt

SEQ ID NO: 33440 - RNA, 21 nt, synthetic construct
  source 1..21: mol_type = other RNA; note = Description of Artificial Sequence: Synthetic oligonucleotide
tttaaatgtggactggacatt

SEQ ID NO: 33441 - RNA, 21 nt, synthetic construct
  source 1..21: mol_type = other RNA; note = Description of Artificial Sequence: Synthetic oligonucleotide
ttttaaatgtggactggactt

SEQ ID NO: 33442 - RNA, 21 nt, synthetic construct
  source 1..21: mol_type = other RNA; note = Description of Artificial Sequence: Synthetic oligonucleotide
tctttaaatgtggactggatt

SEQ ID NO: 33443 - RNA, 21 nt, synthetic construct
  source 1..21: mol_type = other RNA; note = Description of Artificial Sequence: Synthetic oligonucleotide
ttctttaaatgtggactggtt

SEQ ID NO: 33444 - RNA, 21 nt, synthetic construct
  source 1..21: mol_type = other RNA; note = Description of Artificial Sequence: Synthetic oligonucleotide
tctctttaaatgtggactgtt

SEQ ID NO: 33445 - RNA, 21 nt, synthetic construct
  source 1..21: mol_type = other RNA; note = Description of Artificial Sequence: Synthetic oligonucleotide
tgctctttaaatgtggacttt

SEQ ID NO: 33446 - RNA, 21 nt, synthetic construct
  source 1..21: mol_type = other RNA; note = Description of Artificial Sequence: Synthetic oligonucleotide
ttgctctttaaatgtggactt

SEQ ID NO: 33447 - RNA, 21 nt, synthetic construct
  source 1..21: mol_type = other RNA; note = Description of Artificial Sequence: Synthetic oligonucleotide
tgtgctctttaaatgtggatt

SEQ ID NO: 33448 - RNA, 21 nt, synthetic construct
  source 1..21: mol_type = other RNA; note = Description of Artificial Sequence: Synthetic oligonucleotide
tagtgctctttaaatgtggtt

SEQ ID NO: 33449 - RNA, 21 nt, synthetic construct
  source 1..21: mol_type = other RNA; note = Description of Artificial Sequence: Synthetic oligonucleotide
taagtgctctttaaatgtgtt

SEQ ID NO: 33450 - RNA, 21 nt, synthetic construct
  source 1..21: mol_type = other RNA; note = Description of Artificial Sequence: Synthetic oligonucleotide
ttaagtgctctttaaatgttt

SEQ ID NO: 33451 - RNA, 21 nt, synthetic construct
  source 1..21: mol_type = other RNA; note = Description of Artificial Sequence: Synthetic oligonucleotide
tgtaagtgctctttaaatgtt

SEQ ID NO: 33452 - RNA, 21 nt, synthetic construct
  source 1..21: mol_type = other RNA; note = Description of Artificial Sequence: Synthetic oligonucleotide
tagtaagtgctctttaaattt

SEQ ID NO: 33453 - RNA, 21 nt, synthetic construct
  source 1..21: mol_type = other RNA; note = Description of Artificial Sequence: Synthetic oligonucleotide
tcagtaagtgctctttaaatt

SEQ ID NO: 33454 - RNA, 21 nt, synthetic construct
  source 1..21: mol_type = other RNA; note = Description of Artificial Sequence: Synthetic oligonucleotide
tacagtaagtgctctttaatt

SEQ ID NO: 33455 - RNA, 21 nt, synthetic construct
  source 1..21: mol_type = other RNA; note = Description of Artificial Sequence: Synthetic oligonucleotide
tcacagtaagtgctctttatt

SEQ ID NO: 33456 - RNA, 21 nt, synthetic construct
  source 1..21: mol_type = other RNA; note = Description of Artificial Sequence: Synthetic oligonucleotide
tccacagtaagtgctcttttt

SEQ ID NO: 33457 - RNA, 21 nt, synthetic construct
  source 1..21: mol_type = other RNA; note = Description of Artificial Sequence: Synthetic oligonucleotide
ttccacagtaagtgctctttt

SEQ ID NO: 33458 - RNA, 21 nt, synthetic construct
  source 1..21: mol_type = other RNA; note = Description of Artificial Sequence: Synthetic oligonucleotide
tttccacagtaagtgctcttt

SEQ ID NO: 33459 - RNA, 21 nt, synthetic construct
  source 1..21: mol_type = other RNA; note = Description of Artificial Sequence: Synthetic oligonucleotide
tgttccacagtaagtgctctt

SEQ ID NO: 33460 - RNA, 21 nt, synthetic construct
  source 1..21: mol_type = other RNA; note = Description of Artificial Sequence: Synthetic oligonucleotide
ttgttccacagtaagtgcttt

SEQ ID NO: 33461 - RNA, 21 nt, synthetic construct
  source 1..21: mol_type = other RNA; note = Description of Artificial Sequence: Synthetic oligonucleotide
tttgttccacagtaagtgctt

SEQ ID NO: 33462 - RNA, 21 nt, synthetic construct
  source 1..21: mol_type = other RNA; note = Description of Artificial Sequence: Synthetic oligonucleotide
tcttgttccacagtaagtgtt

SEQ ID NO: 33463 - RNA, 21 nt, synthetic construct
  source 1..21: mol_type = other RNA; note = Description of Artificial Sequence: Synthetic oligonucleotide
tgcttgttccacagtaagttt

SEQ ID NO: 33464 - RNA, 21 nt, synthetic construct
  source 1..21: mol_type = other RNA; note = Description of Artificial Sequence: Synthetic oligonucleotide
tggcttgttccacagtaagtt

SEQ ID NO: 33465 - RNA, 21 nt, synthetic construct
  source 1..21: mol_type = other RNA; note = Description of Artificial Sequence: Synthetic oligonucleotide
taggcttgttccacagtaatt

SEQ ID NO: 33466 - RNA, 21 nt, synthetic construct
  source 1..21: mol_type = other RNA; note = Description of Artificial Sequence: Synthetic oligonucleotide
taaggcttgttccacagtatt

SEQ ID NO: 33467 - RNA, 21 nt, synthetic construct
  source 1..21: mol_type = other RNA; note = Description of Artificial Sequence: Synthetic oligonucleotide
tgaaggcttgttccacagttt

SEQ ID NO: 33468 - RNA, 21 nt, synthetic construct
  source 1..21: mol_type = other RNA; note = Description of Artificial Sequence: Synthetic oligonucleotide
ttgaaggcttgttccacagtt

SEQ ID NO: 33469 - RNA, 21 nt, synthetic construct
  source 1..21: mol_type = other RNA; note = Description of Artificial Sequence: Synthetic oligonucleotide
tctgaaggcttgttccacatt

SEQ ID NO: 33470 - RNA, 21 nt, synthetic construct
  source 1..21: mol_type = other RNA; note = Description of Artificial Sequence: Synthetic oligonucleotide
tgctgaaggcttgttccactt

SEQ ID NO: 33471 - RNA, 21 nt, synthetic construct
  source 1..21: mol_type = other RNA; note = Description of Artificial Sequence: Synthetic oligonucleotide
tggctgaaggcttgttccatt

SEQ ID NO: 33472 - RNA, 21 nt, synthetic construct
  source 1..21: mol_type = other RNA; note = Description of Artificial Sequence: Synthetic oligonucleotide
ttggctgaaggcttgttcctt

SEQ ID NO: 33473 - RNA, 21 nt, synthetic construct
  source 1..21: mol_type = other RNA; note = Description of Artificial Sequence: Synthetic oligonucleotide
tttggctgaaggcttgttctt

SEQ ID NO: 33474 - RNA, 21 nt, synthetic construct
  source 1..21: mol_type = other RNA; note = Description of Artificial Sequence: Synthetic oligonucleotide
ttttggctgaaggcttgtttt

SEQ ID NO: 33475 - RNA, 21 nt, synthetic construct
  source 1..21: mol_type = other RNA; note = Description of Artificial Sequence: Synthetic oligonucleotide
tgtttggctgaaggcttgttt

SEQ ID NO: 33476 - RNA, 21 nt, synthetic construct
  source 1..21: mol_type = other RNA; note = Description of Artificial Sequence: Synthetic oligonucleotide
ttgtttggctgaaggcttgtt

SEQ ID NO: 33477 - RNA, 21 nt, synthetic construct
  source 1..21: mol_type = other RNA; note = Description of Artificial Sequence: Synthetic oligonucleotide
tttgtttggctgaaggctttt

SEQ ID NO: 33478 - RNA, 21 nt, synthetic construct
  source 1..21: mol_type = other RNA; note = Description of Artificial Sequence: Synthetic oligonucleotide
tattgtttggctgaaggcttt

SEQ ID NO: 33479 - RNA, 21 nt, synthetic construct
  source 1..21: mol_type = other RNA; note = Description of Artificial Sequence: Synthetic oligonucleotide
tcattgtttggctgaaggctt

SEQ ID NO: 33480 - RNA, 21 nt, synthetic construct
  source 1..21: mol_type = other RNA; note = Description of Artificial Sequence: Synthetic oligonucleotide
tccattgtttggctgaaggtt

SEQ ID NO: 33481 - RNA, 21 nt, synthetic construct
  source 1..21: mol_type = other RNA; note = Description of Artificial Sequence: Synthetic oligonucleotide
tcccattgtttggctgaagtt

SEQ ID NO: 33482 - RNA, 21 nt, synthetic construct
  source 1..21: mol_type = other RNA; note = Description of Artificial Sequence: Synthetic oligonucleotide
tccccattgtttggctgaatt

SEQ ID NO: 33483 - RNA, 21 nt, synthetic construct
  source 1..21: mol_type = other RNA; note = Description of Artificial Sequence: Synthetic oligonucleotide
ttccccattgtttggctgatt

SEQ ID NO: 33484 - RNA, 21 nt, synthetic construct
  source 1..21: mol_type = other RNA; note = Description of Artificial Sequence: Synthetic oligonucleotide
tatccccattgtttggctgtt

SEQ ID NO: 33485 - RNA, 21 nt, synthetic construct
  source 1..21: mol_type = other RNA; note = Description of Artificial Sequence: Synthetic oligonucleotide
ttatccccattgtttggcttt

SEQ ID NO: 33486 - RNA, 21 nt, synthetic construct
  source 1..21: mol_type = other RNA; note = Description of Artificial Sequence: Synthetic oligonucleotide
tctatccccattgtttggctt

SEQ ID NO: 33487 - RNA, 21 nt, synthetic construct
  source 1..21: mol_type = other RNA; note = Description of Artificial Sequence: Synthetic oligonucleotide
ttctatccccattgtttggtt

SEQ ID NO: 33488 - RNA, 21 nt, synthetic construct
  source 1..21: mol_type = other RNA; note = Description of Artificial Sequence: Synthetic oligonucleotide
tttctatccccattgtttgtt

SEQ ID NO: 33489 - RNA, 21 nt, synthetic construct
  source 1..21: mol_type = other RNA; note = Description of Artificial Sequence: Synthetic oligonucleotide
ttttctatccccattgttttt

SEQ ID NO: 33490 - RNA, 21 nt, synthetic construct
  source 1..21: mol_type = other RNA; note = Description of Artificial Sequence: Synthetic oligonucleotide
tttttctatccccattgtttt

SEQ ID NO: 33491 - RNA, 21 nt, synthetic construct
  source 1..21: mol_type = other RNA; note = Description of Artificial Sequence: Synthetic oligonucleotide
tcttttctatccccattgttt

SEQ ID NO: 33492 - RNA, 21 nt, synthetic construct
  source 1..21: mol_type = other RNA; note = Description of Artificial Sequence: Synthetic oligonucleotide
tacttttctatccccattgtt

SEQ ID NO: 33493 - RNA, 21 nt, synthetic construct
  source 1..21: mol_type = other RNA; note = Description of Artificial Sequence: Synthetic oligonucleotide
ttacttttctatccccatttt

SEQ ID NO: 33494 - RNA, 21 nt, synthetic construct
  source 1..21: mol_type = other RNA; note = Description of Artificial Sequence: Synthetic oligonucleotide
tctacttttctatccccattt

SEQ ID NO: 33495 - RNA, 21 nt, synthetic construct
  source 1..21: mol_type = other RNA; note = Description of Artificial Sequence: Synthetic oligonucleotide
tcctacttttctatccccatt

SEQ ID NO: 33496 - RNA, 21 nt, synthetic construct
  source 1..21: mol_type = other RNA; note = Description of Artificial Sequence: Synthetic oligonucleotide
tacctacttttctatcccctt

SEQ ID NO: 33497 - RNA, 21 nt, synthetic construct
  source 1..21: mol_type = other RNA; note = Description of Artificial Sequence: Synthetic oligonucleotide
ttacctacttttctatccctt

SEQ ID NO: 33498 - RNA, 21 nt, synthetic construct
  source 1..21: mol_type = other RNA; note = Description of Artificial Sequence: Synthetic oligonucleotide
tttacctacttttctatcctt

SEQ ID NO: 33499 - RNA, 21 nt, synthetic construct
  source 1..21: mol_type = other RNA; note = Description of Artificial Sequence: Synthetic oligonucleotide
tcttacctacttttctatctt

SEQ ID NO: 33500 - RNA, 21 nt, synthetic construct
  source 1..21: mol_type = other RNA; note = Description of Artificial Sequence: Synthetic oligonucleotide
ttcttacctacttttctattt

SEQ ID NO: 33501 - RNA, 21 nt, synthetic construct
  source 1..21: mol_type = other RNA; note = Description of Artificial Sequence: Synthetic oligonucleotide
tgtcttacctacttttctatt

SEQ ID NO: 33502 - RNA, 21 nt, synthetic construct
  source 1..21: mol_type = other RNA; note = Description of Artificial Sequence: Synthetic oligonucleotide
tagtcttacctacttttcttt

SEQ ID NO: 33503 - RNA, 21 nt, synthetic construct
  source 1..21: mol_type = other RNA; note = Description of Artificial Sequence: Synthetic oligonucleotide
tgagtcttacctacttttctt

SEQ ID NO: 33504 - RNA, 21 nt, synthetic construct
  source 1..21: mol_type = other RNA; note = Description of Artificial Sequence: Synthetic oligonucleotide
ttgagtcttacctactttttt

SEQ ID NO: 33505 - RNA, 21 nt, synthetic construct
  source 1..21: mol_type = other RNA; note = Description of Artificial Sequence: Synthetic oligonucleotide
tctgagtcttacctacttttt

SEQ ID NO: 33506 - RNA, 21 nt, synthetic construct
  source 1..21: mol_type = other RNA; note = Description of Artificial Sequence: Synthetic oligonucleotide
tgctgagtcttacctactttt

SEQ ID NO: 33507 - RNA, 21 nt, synthetic construct
  source 1..21: mol_type = other RNA; note = Description of Artificial Sequence: Synthetic oligonucleotide
tggctgagtcttacctacttt

SEQ ID NO: 33508 - RNA, 21 nt, synthetic construct
  source 1..21: mol_type = other RNA; note = Description of Artificial Sequence: Synthetic oligonucleotide
taggctgagtcttacctactt

SEQ ID NO: 33509 - RNA, 21 nt, synthetic construct
  source 1..21: mol_type = other RNA; note = Description of Artificial Sequence: Synthetic oligonucleotide
taaggctgagtcttacctatt

SEQ ID NO: 33510 - RNA, 21 nt, synthetic construct
  source 1..21: mol_type = other RNA; note = Description of Artificial Sequence: Synthetic oligonucleotide
taaaggctgagtcttaccttt

SEQ ID NO: 33511 - RNA, 21 nt, synthetic construct
  source 1..21: mol_type = other RNA; note = Description of Artificial Sequence: Synthetic oligonucleotide
tcaaaggctgagtcttacctt

SEQ ID NO: 33512 - RNA, 21 nt, synthetic construct
  source 1..21: mol_type = other RNA; note = Description of Artificial Sequence: Synthetic oligonucleotide
tacaaaggctgagtcttactt

SEQ ID NO: 33513 - RNA, 21 nt, synthetic construct
  source 1..21: mol_type = other RNA; note = Description of Artificial Sequence: Synthetic oligonucleotide
tgacaaaggctgagtcttatt

SEQ ID NO: 33514 - RNA, 21 nt, synthetic construct
  source 1..21: mol_type = other RNA; note = Description of Artificial Sequence: Synthetic oligonucleotide
tggacaaaggctgagtctttt

SEQ ID NO: 33515 - RNA, 21 nt, synthetic construct
  source 1..21: mol_type = other RNA; note = Description of Artificial Sequence: Synthetic oligonucleotide
ttggacaaaggctgagtcttt

SEQ ID NO: 33516 - RNA, 21 nt, synthetic construct
  source 1..21: mol_type = other RNA; note = Description of Artificial Sequence: Synthetic oligonucleotide
tctggacaaaggctgagtctt

SEQ ID NO: 33517 - RNA, 21 nt, synthetic construct
  source 1..21: mol_type = other RNA; note = Description of Artificial Sequence: Synthetic oligonucleotide
ttctggacaaaggctgagttt

SEQ ID NO: 33518 - RNA, 21 nt, synthetic construct
  source 1..21: mol_type = other RNA; note = Description of Artificial Sequence: Synthetic oligonucleotide
tctctggacaaaggctgagtt

SEQ ID NO: 33519 - RNA, 21 nt, synthetic construct
  source 1..21: mol_type = other RNA; note = Description of Artificial Sequence: Synthetic oligonucleotide
ttctctggacaaaggctgatt

SEQ ID NO: 33520 - RNA, 21 nt, synthetic construct
  source 1..21: mol_type = other RNA; note = Description of Artificial Sequence: Synthetic oligonucleotide
tttctctggacaaaggctgtt

SEQ ID NO: 33521 - RNA, 21 nt, synthetic construct
  source 1..21: mol_type = other RNA; note = Description of Artificial Sequence: Synthetic oligonucleotide
tcttctctggacaaaggcttt

SEQ ID NO: 33522 - RNA, 21 nt, synthetic construct
  source 1..21: mol_type = other RNA; note = Description of Artificial Sequence: Synthetic oligonucleotide
tgcttctctggacaaaggctt

SEQ ID NO: 33523 - RNA, 21 nt, synthetic construct
  source 1..21: mol_type = other RNA; note = Description of Artificial Sequence: Synthetic oligonucleotide
tagcttctctggacaaaggtt

SEQ ID NO: 33524 - RNA, 21 nt, synthetic construct
  source 1..21: mol_type = other RNA; note = Description of Artificial Sequence: Synthetic oligonucleotide
tgagcttctctggacaaagtt

SEQ ID NO: 33525 - RNA, 21 nt, synthetic construct
  source 1..21: mol_type = other RNA; note = Description of Artificial Sequence: Synthetic oligonucleotide
ttgagcttctctggacaaatt

SEQ ID NO: 33526 - RNA, 21 nt, synthetic construct
  source 1..21: mol_type = other RNA; note = Description of Artificial Sequence: Synthetic oligonucleotide
tctgagcttctctggacaatt

SEQ ID NO: 33527 - RNA, 21 nt, synthetic construct
  source 1..21: mol_type = other RNA; note = Description of Artificial Sequence: Synthetic oligonucleotide
tcctgagcttctctggacatt

SEQ ID NO: 33528 - RNA, 21 nt, synthetic construct
  source 1..21: mol_type = other RNA; note = Description of Artificial Sequence: Synthetic oligonucleotide
tccctgagcttctctggactt

SEQ ID NO: 33529 - RNA, 21 nt, synthetic construct
  source 1..21: mol_type = other RNA; note = Description of Artificial Sequence: Synthetic oligonucleotide
taccctgagcttctctggatt

SEQ ID NO: 33530 - RNA, 21 nt, synthetic construct
  source 1..21: mol_type = other RNA; note = Description of Artificial Sequence: Synthetic oligonucleotide
ttaccctgagcttctctggtt

SEQ ID NO: 33531 - RNA, 21 nt, synthetic construct
  source 1..21: mol_type = other RNA; note = Description of Artificial Sequence: Synthetic oligonucleotide
tataccctgagcttctctgtt

SEQ ID NO: 33532 - RNA, 21 nt, synthetic construct
  source 1..21: mol_type = other RNA; note = Description of Artificial Sequence: Synthetic oligonucleotide
ttataccctgagcttctcttt

SEQ ID NO: 33533 - RNA, 21 nt, synthetic construct
  source 1..21: mol_type = other RNA; note = Description of Artificial Sequence: Synthetic oligonucleotide
tctataccctgagcttctctt

SEQ ID NO: 33534 - RNA, 21 nt, synthetic construct
  source 1..21: mol_type = other RNA; note = Description of Artificial Sequence: Synthetic oligonucleotide
tgctataccctgagcttcttt

SEQ ID NO: 33535 - RNA, 21 nt, synthetic construct
  source 1..21: mol_type = other RNA; note = Description of Artificial Sequence: Synthetic oligonucleotide
tagctataccctgagcttctt

SEQ ID NO: 33536 - RNA, 21 nt, synthetic construct
  source 1..21: mol_type = other RNA; note = Description of Artificial Sequence: Synthetic oligonucleotide
tcagctataccctgagctttt

SEQ ID NO: 33537 - RNA, 21 nt, synthetic construct
  source 1..21: mol_type = other RNA; note = Description of Artificial Sequence: Synthetic oligonucleotide
ttcagctataccctgagcttt

SEQ ID NO: 33538 - RNA, 21 nt, synthetic construct
  source 1..21: mol_type = other RNA; note = Description of Artificial Sequence: Synthetic oligonucleotide
tttcagctataccctgagctt

SEQ ID NO: 33539 - RNA, 21 nt, synthetic construct
  source 1..21: mol_type = other RNA; note = Description of Artificial Sequence: Synthetic oligonucleotide
tattcagctataccctgagtt

SEQ ID NO: 33540 - RNA, 21 nt, synthetic construct
  source 1..21: mol_type = other RNA; note = Description of Artificial Sequence: Synthetic oligonucleotide
ttattcagctataccctgatt

SEQ ID NO: 33541 - RNA, 21 nt, synthetic construct
  source 1..21: mol_type = other RNA; note = Description of Artificial Sequence: Synthetic oligonucleotide
tctattcagctataccctgtt

SEQ ID NO: 33542 - RNA, 21 nt, synthetic construct
  source 1..21: mol_type = other RNA; note = Description of Artificial Sequence: Synthetic oligonucleotide
tcctattcagctatacccttt

SEQ ID NO: 33543 - RNA, 21 nt, synthetic construct
  source 1..21: mol_type = other RNA; note = Description of Artificial Sequence: Synthetic oligonucleotide
tgcctattcagctataccctt

SEQ ID NO: 33544 - RNA, 21 nt, synthetic construct
  source 1..21: mol_type = other RNA; note = Description of Artificial Sequence: Synthetic oligonucleotide
ttgcctattcagctatacctt

SEQ ID NO: 33545 - RNA, 21 nt, synthetic construct
  source 1..21: mol_type = other RNA; note = Description of Artificial Sequence: Synthetic oligonucleotide
tctgcctattcagctatactt

SEQ ID NO: 33546 - RNA, 21 nt, synthetic construct
  source 1..21: mol_type = other RNA; note = Description of Artificial Sequence: Synthetic oligonucleotide
tactgcctattcagctatatt

SEQ ID NO: 33547 - RNA, 21 nt, synthetic construct
  source 1..21: mol_type = other RNA; note = Description of Artificial Sequence: Synthetic oligonucleotide
taactgcctattcagctattt

SEQ ID NO: 33548 - RNA, 21 nt, synthetic construct
  source 1..21: mol_type = other RNA; note = Description of Artificial Sequence: Synthetic oligonucleotide
taaactgcctattcagctatt

SEQ ID NO: 33549 - RNA, 21 nt, synthetic construct
  source 1..21: mol_type = other RNA; note = Description of Artificial Sequence: Synthetic oligonucleotide
tgaaactgcctattcagcttt

SEQ ID NO: 33550 - RNA, 21 nt, synthetic construct
  source 1..21: mol_type = other RNA; note = Description of Artificial Sequence: Synthetic oligonucleotide
tagaaactgcctattcagctt

SEQ ID NO: 33551 - RNA, 21 nt, synthetic construct
  source 1..21: mol_type = other RNA; note = Description of Artificial Sequence: Synthetic oligonucleotide
taagaaactgcctattcagtt

SEQ ID NO: 33552 - RNA, 21 nt, synthetic construct
  source 1..21: mol_type = other RNA; note = Description of Artificial Sequence: Synthetic oligonucleotide
taaagaaactgcctattcatt

SEQ ID NO: 33553 - RNA, 21 nt, synthetic construct
  source 1..21: mol_type = other RNA; note = Description of Artificial Sequence: Synthetic oligonucleotide
taaaagaaactgcctattctt

SEQ ID NO: 33554 - RNA, 21 nt, synthetic construct
  source 1..21: mol_type = other RNA; note = Description of Artificial Sequence: Synthetic oligonucleotide
tcaaaagaaactgcctatttt

SEQ ID NO: 33555 - RNA, 21 nt, synthetic construct
  source 1..21: mol_type = other RNA; note = Description of Artificial Sequence: Synthetic oligonucleotide
tacaaaagaaactgcctattt

SEQ ID NO: 33556 - RNA, 21 nt, synthetic construct
  source 1..21: mol_type = other RNA; note = Description of Artificial Sequence: Synthetic oligonucleotide
tgacaaaagaaactgcctatt

SEQ ID NO: 33557 - RNA, 21 nt, synthetic construct
  source 1..21: mol_type = other RNA; note = Description of Artificial Sequence: Synthetic oligonucleotide
tggacaaaagaaactgccttt

SEQ ID NO: 33558 - RNA, 21 nt, synthetic construct
  source 1..21: mol_type = other RNA; note = Description of Artificial Sequence: Synthetic oligonucleotide
taggacaaaagaaactgcctt

SEQ ID NO: 33559 - RNA, 21 nt, synthetic construct
  source 1..21: mol_type = other RNA; note = Description of Artificial Sequence: Synthetic oligonucleotide
tcaggacaaaagaaactgctt

SEQ ID NO: 33560 - RNA, 21 nt, synthetic construct
  source 1..21: mol_type = other RNA; note = Description of Artificial Sequence: Synthetic oligonucleotide
ttcaggacaaaagaaactgtt

SEQ ID NO: 33561 - RNA, 21 nt, synthetic construct
  source 1..21: mol_type = other RNA; note = Description of Artificial Sequence: Synthetic oligonucleotide
tctcaggacaaaagaaacttt

SEQ ID NO: 33562 - RNA, 21 nt, synthetic construct
  source 1..21: mol_type = other RNA; note = Description of Artificial Sequence: Synthetic oligonucleotide
tcctcaggacaaaagaaactt

SEQ ID NO: 33563 - RNA, 21 nt, synthetic construct
  source 1..21: mol_type = other RNA; note = Description of Artificial Sequence: Synthetic oligonucleotide
ttcctcaggacaaaagaaatt

SEQ ID NO: 33564 - RNA, 21 nt, synthetic construct
  source 1..21: mol_type = other RNA; note = Description of Artificial Sequence: Synthetic oligonucleotide
tttcctcaggacaaaagaatt

SEQ ID NO: 33565 - RNA, 21 nt, synthetic construct
  source 1..21: mol_type = other RNA; note = Description of Artificial Sequence: Synthetic oligonucleotide
ttttcctcaggacaaaagatt

SEQ ID NO: 33566 - RNA, 21 nt, synthetic construct
  source 1..21: mol_type = other RNA; note = Description of Artificial Sequence: Synthetic oligonucleotide
tttttcctcaggacaaaagtt

SEQ ID NO: 33567 - RNA, 21 nt, synthetic construct
  source 1..21: mol_type = other RNA; note = Description of Artificial Sequence: Synthetic oligonucleotide
tattttcctcaggacaaaatt

SEQ ID NO: 33568 - RNA, 21 nt, synthetic construct
  source 1..21: mol_type = other RNA; note = Description of Artificial Sequence: Synthetic oligonucleotide
tgattttcctcaggacaaatt

SEQ ID NO: 33569 - RNA, 21 nt, synthetic construct
  source 1..21: mol_type = other RNA; note = Description of Artificial Sequence: Synthetic oligonucleotide
ttgattttcctcaggacaatt

SEQ ID NO: 33570 - RNA, 21 nt, synthetic construct
  source 1..21: mol_type = other RNA; note = Description of Artificial Sequence: Synthetic oligonucleotide
tctgattttcctcaggacatt

SEQ ID NO: 33571 - RNA, 21 nt, synthetic construct
  source 1..21: mol_type = other RNA; note = Description of Artificial Sequence: Synthetic oligonucleotide
tcctgattttcctcaggactt

SEQ ID NO: 33572 - RNA, 21 nt, synthetic construct
  source 1..21: mol_type = other RNA; note = Description of Artificial Sequence: Synthetic oligonucleotide
ttcctgattttcctcaggatt

SEQ ID NO: 33573 - RNA, 21 nt, synthetic construct
  source 1..21: mol_type = other RNA; note = Description of Artificial Sequence: Synthetic oligonucleotide
tgtcctgattttcctcaggtt

SEQ ID NO: 33574 - RNA, 21 nt, synthetic construct
  source 1..21: mol_type = other RNA; note = Description of Artificial Sequence: Synthetic oligonucleotide
ttgtcctgattttcctcagtt

SEQ ID NO: 33575 - RNA, 21 nt, synthetic construct
  source 1..21: mol_type = other RNA; note = Description of Artificial Sequence: Synthetic oligonucleotide
tatgtcctgattttcctcatt

SEQ ID NO: 33576 - RNA, 21 nt, synthetic construct
  source 1..21: mol_type = other RNA; note = Description of Artificial Sequence: Synthetic oligonucleotide
tcatgtcctgattttcctctt

SEQ ID NO: 33577 - RNA, 21 nt, synthetic construct
  source 1..21: mol_type = other RNA; note = Description of Artificial Sequence: Synthetic oligonucleotide
tgcatgtcctgattttccttt

SEQ ID NO: 33578 - RNA, 21 nt, synthetic construct
  source 1..21: mol_type = other RNA; note = Description of Artificial Sequence: Synthetic oligonucleotide
tggcatgtcctgattttcctt

SEQ ID NO: 33579 - RNA, 21 nt, synthetic construct
  source 1..21: mol_type = other RNA; note = Description of Artificial Sequence: Synthetic oligonucleotide
taggcatgtcctgattttctt

SEQ ID NO: 33580 - RNA, 21 nt, synthetic construct
  source 1..21: mol_type = other RNA; note = Description of Artificial Sequence: Synthetic oligonucleotide
tcaggcatgtcctgatttttt

SEQ ID NO: 33581 - RNA, 21 nt, synthetic construct
  source 1..21: mol_type = other RNA; note = Description of Artificial Sequence: Synthetic oligonucleotide
tgcaggcatgtcctgattttt

SEQ ID NO: 33582 - RNA, 21 nt, synthetic construct
  source 1..21: mol_type = other RNA; note = Description of Artificial Sequence: Synthetic oligonucleotide
tagcaggcatgtcctgatttt

SEQ ID NO: 33583 - RNA, 21 nt, synthetic construct
  source 1..21: mol_type = other RNA; note = Description of Artificial Sequence: Synthetic oligonucleotide
taagcaggcatgtcctgattt

SEQ ID NO: 33584 - RNA, 21 nt, synthetic construct
  source 1..21: mol_type = other RNA; note = Description of Artificial Sequence: Synthetic oligonucleotide
taaagcaggcatgtcctgatt

SEQ ID NO: 33585 - RNA, 21 nt, synthetic construct
  source 1..21: mol_type = other RNA; note = Description of Artificial Sequence: Synthetic oligonucleotide
tgaaagcaggcatgtcctgtt

SEQ ID NO: 33586 - RNA, 21 nt, synthetic construct
  source 1..21: mol_type = other RNA; note = Description of Artificial Sequence: Synthetic oligonucleotide
tagaaagcaggcatgtccttt

SEQ ID NO: 33587 - RNA, 21 nt, synthetic construct
  source 1..21: mol_type = other RNA; note = Description of Artificial Sequence: Synthetic oligonucleotide
ttagaaagcaggcatgtcctt

SEQ ID NO: 33588 - RNA, 21 nt, synthetic construct
  source 1..21: mol_type = other RNA; note = Description of Artificial Sequence: Synthetic oligonucleotide
tttagaaagcaggcatgtctt

SEQ ID NO: 33589 - RNA, 21 nt, synthetic construct
  source 1..21: mol_type = other RNA; note = Description of Artificial Sequence: Synthetic oligonucleotide
ttttagaaagcaggcatgttt

SEQ ID NO: 33590 - RNA, 21 nt, synthetic construct
  source 1..21: mol_type = other RNA; note = Description of Artificial Sequence: Synthetic oligonucleotide
tttttagaaagcaggcatgtt

SEQ ID NO: 33591 - RNA, 21 nt, synthetic construct
  source 1..21: mol_type = other RNA; note = Description of Artificial Sequence: Synthetic oligonucleotide
ttttttagaaagcaggcattt

SEQ ID NO: 33592 - RNA, 21 nt, synthetic construct
  source 1..21: mol_type = other RNA; note = Description of Artificial Sequence: Synthetic oligonucleotide
tatttttagaaagcaggcatt

SEQ ID NO: 33593 - RNA, 21 nt, synthetic construct
  source 1..21: mol_type = other RNA; note = Description of Artificial Sequence: Synthetic oligonucleotide
tgatttttagaaagcaggctt

SEQ ID NO: 33594 - RNA, 21 nt, synthetic construct
  source 1..21: mol_type = other RNA; note = Description of Artificial Sequence: Synthetic oligonucleotide
tagatttttagaaagcaggtt

SEQ ID NO: 33595 - RNA, 21 nt, synthetic construct
  source 1..21: mol_type = other RNA; note = Description of Artificial Sequence: Synthetic oligonucleotide
taagatttttagaaagcagtt

SEQ ID NO: 33596 - RNA, 21 nt, synthetic construct
  source 1..21: mol_type = other RNA; note = Description of Artificial Sequence: Synthetic oligonucleotide
tgaagatttttagaaagcatt

SEQ ID NO: 33597 - RNA, 21 nt, synthetic construct
  source 1..21: mol_type = other RNA; note = Description of Artificial Sequence: Synthetic oligonucleotide
tggaagatttttagaaagctt

SEQ ID NO: 33598 - RNA, 21 nt, synthetic construct
  source 1..21: mol_type = other RNA; note = Description of Artificial Sequence: Synthetic oligonucleotide
taggaagatttttagaaagtt

SEQ ID NO: 33599 - RNA, 21 nt, synthetic construct
  source 1..21: mol_type = other RNA; note = Description of Artificial Sequence: Synthetic oligonucleotide
tgaggaagatttttagaaatt

SEQ ID NO: 33600 - RNA, 21 nt, synthetic construct
  source 1..21: mol_type = other RNA; note = Description of Artificial Sequence: Synthetic oligonucleotide
tagaggaagatttttagaatt

SEQ ID NO: 33601 - RNA, 21 nt, synthetic construct
  source 1..21: mol_type = other RNA; note = Description of Artificial Sequence: Synthetic oligonucleotide
tcagaggaagatttttagatt

SEQ ID NO: 33602 - RNA, 21 nt, synthetic construct
  source 1..21: mol_type = other RNA; note = Description of Artificial Sequence: Synthetic oligonucleotide
ttcagaggaagatttttagtt

SEQ ID NO: 33603 - RNA, 21 nt, synthetic construct
  source 1..21: mol_type = other RNA; note = Description of Artificial Sequence: Synthetic oligonucleotide
tttcagaggaagatttttatt

SEQ ID NO: 33604 - RNA, 21 nt, synthetic construct
  source 1..21: mol_type = other RNA; note = Description of Artificial Sequence: Synthetic oligonucleotide
tcttcagaggaagattttttt

SEQ ID NO: 33605 - RNA, 21 nt, synthetic construct
  source 1..21: mol_type = other RNA; note = Description of Artificial Sequence: Synthetic oligonucleotide
ttcttcagaggaagatttttt

SEQ ID NO: 33606 - RNA, 21 nt, synthetic construct
  source 1..21: mol_type = other RNA; note = Description of Artificial Sequence: Synthetic oligonucleotide
tgtcttcagaggaagattttt

SEQ ID NO: 33607 - RNA, 21 nt, synthetic construct
  source 1..21: mol_type = other RNA; note = Description of Artificial Sequence: Synthetic oligonucleotide
tggtcttcagaggaagatttt

SEQ ID NO: 33608 - RNA, 21 nt, synthetic construct
  source 1..21: mol_type = other RNA; note = Description of Artificial Sequence: Synthetic oligonucleotide
taggtcttcagaggaagattt

SEQ ID NO: 33609 - RNA, 21 nt, synthetic construct
  source 1..21: mol_type = other RNA; note = Description of Artificial Sequence: Synthetic oligonucleotide
tcaggtcttcagaggaagatt

SEQ ID NO: 33610 - RNA, 21 nt, synthetic construct
  source 1..21: mol_type = other RNA; note = Description of Artificial Sequence: Synthetic oligonucleotide
ttcaggtcttcagaggaagtt

SEQ ID NO: 33611 - RNA, 21 nt, synthetic construct
  source 1..21: mol_type = other RNA; note = Description of Artificial Sequence: Synthetic oligonucleotide
tgtcaggtcttcagaggaatt

SEQ ID NO: 33612 - RNA, 21 nt, synthetic construct
  source 1..21: mol_type = other RNA; note = Description of Artificial Sequence: Synthetic oligonucleotide
tggtcaggtcttcagaggatt

SEQ ID NO: 33613 - RNA, 21 nt, synthetic construct
  source 1..21: mol_type = other RNA; note = Description of Artificial Sequence: Synthetic oligonucleotide
tgggtcaggtcttcagaggtt

SEQ ID NO: 33614 - RNA, 21 nt, synthetic construct
  source 1..21: mol_type = other RNA; note = Description of Artificial Sequence: Synthetic oligonucleotide
ttgggtcaggtcttcagagtt

SEQ ID NO: 33615 - RNA, 21 nt, synthetic construct
  source 1..21: mol_type = other RNA; note = Description of Artificial Sequence: Synthetic oligonucleotide
tttgggtcaggtcttcagatt

SEQ ID NO: 33616 - RNA, 21 nt, synthetic construct
  source 1..21: mol_type = other RNA; note = Description of Artificial Sequence: Synthetic oligonucleotide
tcttgggtcaggtcttcagtt

SEQ ID NO: 33617 - RNA, 21 nt, synthetic construct
  source 1..21: mol_type = other RNA; note = Description of Artificial Sequence: Synthetic oligonucleotide
tgcttgggtcaggtcttcatt

SEQ ID NO: 33618 - RNA, 21 nt, synthetic construct
  source 1..21: mol_type = other RNA; note = Description of Artificial Sequence: Synthetic oligonucleotide
tagcttgggtcaggtcttctt

SEQ ID NO: 33619 - RNA, 21 nt, synthetic construct
  source 1..21: mol_type = other RNA; note = Description of Artificial Sequence: Synthetic oligonucleotide
tgagcttgggtcaggtctttt

SEQ ID NO: 33620 - RNA, 21 nt, synthetic construct
  source 1..21: mol_type = other RNA; note = Description of Artificial Sequence: Synthetic oligonucleotide
tagagcttgggtcaggtcttt

SEQ ID NO: 33621 - RNA, 21 nt, synthetic construct
  source 1..21: mol_type = other RNA; note = Description of Artificial Sequence: Synthetic oligonucleotide
taagagcttgggtcaggtctt

SEQ ID NO: 33622 - RNA, 21 nt, synthetic construct
  source 1..21: mol_type = other RNA; note = Description of Artificial Sequence: Synthetic oligonucleotide
ttaagagcttgggtcaggttt

SEQ ID NO: 33623 - RNA, 21 nt, synthetic construct
  source 1..21: mol_type = other RNA; note = Description of Artificial Sequence: Synthetic oligonucleotide
tttaagagcttgggtcaggtt

SEQ ID NO: 33624 - RNA, 21 nt, synthetic construct
  source 1..21: mol_type = other RNA; note = Description of Artificial Sequence: Synthetic oligonucleotide
ttttaagagcttgggtcagtt

SEQ ID NO: 33625 - RNA, 21 nt, synthetic construct
  source 1..21: mol_type = other RNA; note = Description of Artificial Sequence: Synthetic oligonucleotide
tatttaagagcttgggtcatt

SEQ ID NO: 33626 - RNA, 21 nt, synthetic construct
  source 1..21: mol_type = other RNA; note = Description of Artificial Sequence: Synthetic oligonucleotide
tcatttaagagcttgggtctt

SEQ ID NO: 33627 - RNA, 21 nt, synthetic construct
  source 1..21: mol_type = other RNA; note = Description of Artificial Sequence: Synthetic oligonucleotide
tgcatttaagagcttgggttt

SEQ ID NO: 33628 - RNA, 21 nt, synthetic construct
  source 1..21: mol_type = other RNA; note = Description of Artificial Sequence: Synthetic oligonucleotide
tagcatttaagagcttgggtt

SEQ ID NO: 33629 - RNA, 21 nt, synthetic construct
  source 1..21: mol_type = other RNA; note = Description of Artificial Sequence: Synthetic oligonucleotide
ttagcatttaagagcttggtt

SEQ ID NO: 33630 - RNA, 21 nt, synthetic construct
  source 1..21: mol_type = other RNA; note = Description of Artificial Sequence: Synthetic oligonucleotide
tatagcatttaagagcttgtt

SEQ ID NO: 33631 - RNA, 21 nt, synthetic construct
  source 1..21: mol_type = other RNA; note = Description of Artificial Sequence: Synthetic oligonucleotide
taatagcatttaagagctttt

SEQ ID NO: 33632 - RNA, 21 nt, synthetic construct
  source 1..21: mol_type = other RNA; note = Description of Artificial Sequence: Synthetic oligonucleotide
tcaatagcatttaagagcttt

SEQ ID NO: 33633 - RNA, 21 nt, synthetic construct
  source 1..21: mol_type = other RNA; note = Description of Artificial Sequence: Synthetic oligonucleotide
tacaatagcatttaagagctt

SEQ ID NO: 33634 - RNA, 21 nt, synthetic construct
  source 1..21: mol_type = other RNA; note = Description of Artificial Sequence: Synthetic oligonucleotide
ttacaatagcatttaagagtt

SEQ ID NO: 33635 - RNA, 21 nt, synthetic construct
  source 1..21: mol_type = other RNA; note = Description of Artificial Sequence: Synthetic oligonucleotide
tttacaatagcatttaagatt

SEQ ID NO: 33636 - RNA, 21 nt, synthetic construct
  source 1..21: mol_type = other RNA; note = Description of Artificial Sequence: Synthetic oligonucleotide
tcttacaatagcatttaagtt

SEQ ID NO: 33637 - RNA, 21 nt, synthetic construct
  source 1..21: mol_type = other RNA; note = Description of Artificial Sequence: Synthetic oligonucleotide
ttcttacaatagcatttaatt

SEQ ID NO: 33638 - RNA, 21 nt, synthetic construct
  source 1..21: mol_type = other RNA; note = Description of Artificial Sequence: Synthetic oligonucleotide
tctcttacaatagcatttatt

SEQ ID NO: 33639 - RNA, 21 nt, synthetic construct
  source 1..21: mol_type = other RNA; note = Description of Artificial Sequence: Synthetic oligonucleotide
ttctcttacaatagcattttt

SEQ ID NO: 33640 - RNA, 21 nt, synthetic construct
  source 1..21: mol_type = other RNA; note = Description of Artificial Sequence: Synthetic oligonucleotide
tttctcttacaatagcatttt

SEQ ID NO: 33641 - RNA, 21 nt, synthetic construct
  source 1..21: mol_type = other RNA; note = Description of Artificial Sequence: Synthetic oligonucleotide
ttttctcttacaatagcattt

SEQ ID NO: 33642 - RNA, 21 nt, synthetic construct
  source 1..21: mol_type = other RNA; note = Description of Artificial Sequence: Synthetic oligonucleotide
tatttctcttacaatagcatt

SEQ ID NO: 33643 - RNA, 21 nt, synthetic construct
  source 1..21: mol_type = other RNA; note = Description of Artificial Sequence: Synthetic oligonucleotide
taatttctcttacaatagctt

SEQ ID NO: 33644 - RNA, 21 nt, synthetic construct
  source 1..21: mol_type = other RNA; note = Description of Artificial Sequence: Synthetic oligonucleotide
taaatttctcttacaatagtt

SEQ ID NO: 33645 - RNA, 21 nt, synthetic construct
  source 1..21: mol_type = other RNA; note = Description of Artificial Sequence: Synthetic oligonucleotide
tgaaatttctcttacaatatt

SEQ ID NO: 33646 - RNA, 21 nt, synthetic construct
  source 1..21: mol_type = other RNA; note = Description of Artificial Sequence: Synthetic oligonucleotide
tagaaatttctcttacaattt

SEQ ID NO: 33647 - RNA, 21 nt, synthetic construct
  source 1..21: mol_type = other RNA; note = Description of Artificial Sequence: Synthetic oligonucleotide
taagaaatttctcttacaatt

SEQ ID NO: 33648 - RNA, 21 nt, synthetic construct
  source 1..21: mol_type = other RNA; note = Description of Artificial Sequence: Synthetic oligonucleotide
taaagaaatttctcttacatt

SEQ ID NO: 33649 - RNA, 21 nt, synthetic construct
  source 1..21: mol_type = other RNA; note = Description of Artificial Sequence: Synthetic oligonucleotide
tcaaagaaatttctcttactt

SEQ ID NO: 33650 - RNA, 21 nt, synthetic construct
  source 1..21: mol_type = other RNA; note = Description of Artificial Sequence: Synthetic oligonucleotide
tacaaagaaatttctcttatt

SEQ ID NO: 33651 - RNA, 21 nt, synthetic construct
  source 1..21: mol_type = other RNA; note = Description of Artificial Sequence: Synthetic oligonucleotide
tgacaaagaaatttctctttt

SEQ ID NO: 33652 - RNA, 21 nt, synthetic construct
  source 1..21: mol_type = other RNA; note = Description of Artificial Sequence: Synthetic oligonucleotide
tagacaaagaaatttctcttt

SEQ ID NO: 33653 - RNA, 21 nt, synthetic construct
  source 1..21: mol_type = other RNA; note = Description of Artificial Sequence: Synthetic oligonucleotide
ttagacaaagaaatttctctt

SEQ ID NO: 33654 - RNA, 21 nt, synthetic construct
  source 1..21: mol_type = other RNA; note = Description of Artificial Sequence: Synthetic oligonucleotide
tatagacaaagaaatttcttt

SEQ ID NO: 33655 - RNA, 21 nt, synthetic construct
  source 1..21: mol_type = other RNA; note = Description of Artificial Sequence: Synthetic oligonucleotide
taatagacaaagaaatttctt

SEQ ID NO: 33656 - RNA, 21 nt, synthetic construct
  source 1..21: mol_type = other RNA; note = Description of Artificial Sequence: Synthetic oligonucleotide
ttaatagacaaagaaattttt

SEQ ID NO: 33657 - RNA, 21 nt, synthetic construct
  source 1..21: mol_type = other RNA; note = Description of Artificial Sequence: Synthetic oligonucleotide
tttaatagacaaagaaatttt

SEQ ID NO: 33658 - RNA, 21 nt, synthetic construct
  source 1..21: mol_type = other RNA; note = Description of Artificial Sequence: Synthetic oligonucleotide
tgttaatagacaaagaaattt

SEQ ID NO: 33659 - RNA, 21 nt, synthetic construct
  source 1..21: mol_type = other RNA; note = Description of Artificial Sequence: Synthetic oligonucleotide
tagttaatagacaaagaaatt

SEQ ID NO: 33660 - RNA, 21 nt, synthetic construct
  source 1..21: mol_type = other RNA; note = Description of Artificial Sequence: Synthetic oligonucleotide
tgagttaatagacaaagaatt

SEQ ID NO: 33661 - RNA, 21 nt, synthetic construct
  source 1..21: mol_type = other RNA; note = Description of Artificial Sequence: Synthetic oligonucleotide
tggagttaatagacaaagatt

SEQ ID NO: 33662 - RNA, 21 nt, synthetic construct
  source 1..21: mol_type = other RNA; note = Description of Artificial Sequence: Synthetic oligonucleotide
ttggagttaatagacaaagtt

SEQ ID NO: 33663 - RNA, 21 nt, synthetic construct
  source 1..21: mol_type = other RNA; note = Description of Artificial Sequence: Synthetic oligonucleotide
tatggagttaatagacaaatt

SEQ ID NO: 33664 - RNA, 21 nt, synthetic construct
  source 1..21: mol_type = other RNA; note = Description of Artificial Sequence: Synthetic oligonucleotide
taatggagttaatagacaatt

SEQ ID NO: 33665 - RNA, 21 nt, synthetic construct
  source 1..21: mol_type = other RNA; note = Description of Artificial Sequence: Synthetic oligonucleotide
taaatggagttaatagacatt

SEQ ID NO: 33666 - RNA, 21 nt, synthetic construct
  source 1..21: mol_type = other RNA; note = Description of Artificial Sequence: Synthetic oligonucleotide
taaaatggagttaatagactt

SEQ ID NO: 33667 - RNA, 21 nt, synthetic construct
  source 1..21: mol_type = other RNA; note = Description of Artificial Sequence: Synthetic oligonucleotide
ttaaaatggagttaatagatt

SEQ ID NO: 33668 - RNA, 21 nt, synthetic construct
  source 1..21: mol_type = other RNA; note = Description of Artificial Sequence: Synthetic oligonucleotide
tctaaaatggagttaatagtt

SEQ ID NO: 33669 - RNA, 21 nt, synthetic construct
  source 1..21: mol_type = other RNA; note = Description of Artificial Sequence: Synthetic oligonucleotide
tactaaaatggagttaatatt

SEQ ID NO: 33670 - RNA, 21 nt, synthetic construct
  source 1..21: mol_type = other RNA; note = Description of Artificial Sequence: Synthetic oligonucleotide
ttactaaaatggagttaattt

SEQ ID NO: 33671 - RNA, 21 nt, synthetic construct
  source 1..21: mol_type = other RNA; note = Description of Artificial Sequence: Synthetic oligonucleotide
tctactaaaatggagttaatt

SEQ ID NO: 33672 - RNA, 21 nt, synthetic construct
  source 1..21: mol_type = other RNA; note = Description of Artificial Sequence: Synthetic oligonucleotide
tcctactaaaatggagttatt

SEQ ID NO: 33673 - RNA, 21 nt, synthetic construct
  source 1..21: mol_type = other RNA; note = Description of Artificial Sequence: Synthetic oligonucleotide
tccctactaaaatggagtttt

SEQ ID NO: 33674 - RNA, 21 nt, synthetic construct
  source 1..21: mol_type = other RNA; note = Description of Artificial Sequence: Synthetic oligonucleotide
ttccctactaaaatggagttt

SEQ ID NO: 33675 - RNA, 21 nt, synthetic construct
  source 1..21: mol_type = other RNA; note = Description of Artificial Sequence: Synthetic oligonucleotide
tatccctactaaaatggagtt

SEQ ID NO: 33676 - RNA, 21 nt, synthetic construct
  source 1..21: mol_type = other RNA; note = Description of Artificial Sequence: Synthetic oligonucleotide
taatccctactaaaatggatt

SEQ ID NO: 33677 - RNA, 21 nt, synthetic construct
  source 1..21: mol_type = other RNA; note = Description of Artificial Sequence: Synthetic oligonucleotide
tgaatccctactaaaatggtt

SEQ ID NO: 33678 - RNA, 21 nt, synthetic construct
  source 1..21: mol_type = other RNA; note = Description of Artificial Sequence: Synthetic oligonucleotide
ttgaatccctactaaaatgtt

SEQ ID NO: 33679 - RNA, 21 nt, synthetic construct
  source 1..21: mol_type = other RNA; note = Description of Artificial Sequence: Synthetic oligonucleotide
tgtgaatccctactaaaattt

SEQ ID NO: 33680 - RNA, 21 nt, synthetic construct
  source 1..21: mol_type = other RNA; note = Description of Artificial Sequence: Synthetic oligonucleotide
tagtgaatccctactaaaatt

SEQ ID NO: 33681 - RNA, 21 nt, synthetic construct
  source 1..21: mol_type = other RNA; note = Description of Artificial Sequence: Synthetic oligonucleotide
tcagtgaatccctactaaatt

SEQ ID NO: 33682 - RNA, 21 nt, synthetic construct
  source 1..21: mol_type = other RNA; note = Description of Artificial Sequence: Synthetic oligonucleotide
ttcagtgaatccctactaatt

SEQ ID NO: 33683 - RNA, 21 nt, synthetic construct
  source 1..21: mol_type = other RNA; note = Description of Artificial Sequence: Synthetic oligonucleotide
tgtcagtgaatccctactatt

SEQ ID NO: 33684 - RNA, 21 nt, synthetic construct
  source 1..21: mol_type = other RNA; note = Description of Artificial Sequence: Synthetic oligonucleotide
tagtcagtgaatccctacttt

SEQ ID NO: 33685 - RNA, 21 nt, synthetic construct
  source 1..21: mol_type = other RNA; note = Description of Artificial Sequence: Synthetic oligonucleotide
ttagtcagtgaatccctactt

SEQ ID NO: 33686 - RNA, 21 nt, synthetic construct
  source 1..21: mol_type = other RNA; note = Description of Artificial Sequence: Synthetic oligonucleotide
tctagtcagtgaatccctatt

SEQ ID NO: 33687 - RNA, 21 nt, synthetic construct
  source 1..21: mol_type = other RNA; note = Description of Artificial Sequence: Synthetic oligonucleotide
ttctagtcagtgaatcccttt

SEQ ID NO: 33688 - RNA, 21 nt, synthetic construct
  source 1..21: mol_type = other RNA; note = Description of Artificial Sequence: Synthetic oligonucleotide
tatctagtcagtgaatccctt

SEQ ID NO: 33689 - RNA, 21 nt, synthetic construct
  source 1..21: mol_type = other RNA; note = Description of Artificial Sequence: Synthetic oligonucleotide
taatctagtcagtgaatcctt

SEQ ID NO: 33690 - RNA, 21 nt, synthetic construct
  source 1..21: mol_type = other RNA; note = Description of Artificial Sequence: Synthetic oligonucleotide
taaatctagtcagtgaatctt

SEQ ID NO: 33691 - RNA, 21 nt, synthetic construct
  source 1..21: mol_type = other RNA; note = Description of Artificial Sequence: Synthetic oligonucleotide
taaaatctagtcagtgaattt

SEQ ID NO: 33692 - RNA, 21 nt, synthetic construct
  source 1..21: mol_type = other RNA; note = Description of Artificial Sequence: Synthetic oligonucleotide
ttaaaatctagtcagtgaatt

SEQ ID NO: 33693 - RNA, 21 nt, synthetic construct
  source 1..21: mol_type = other RNA; note = Description of Artificial Sequence: Synthetic oligonucleotide
tgtaaaatctagtcagtgatt

SEQ ID NO: 33694 - RNA, 21 nt, synthetic construct
  source 1..21: mol_type = other RNA; note = Description of Artificial Sequence: Synthetic oligonucleotide
tagtaaaatctagtcagtgtt

SEQ ID NO: 33695 - RNA, 21 nt, synthetic construct
  source 1..21: mol_type = other RNA; note = Description of Artificial Sequence: Synthetic oligonucleotide
tcagtaaaatctagtcagttt

SEQ ID NO: 33696 - RNA, 21 nt, synthetic construct
  source 1..21: mol_type = other RNA; note = Description of Artificial Sequence: Synthetic oligonucleotide
ttcagtaaaatctagtcagtt

SEQ ID NO: 33697 - RNA, 21 nt, synthetic construct
  source 1..21: mol_type = other RNA; note = Description of Artificial Sequence: Synthetic oligonucleotide
tttcagtaaaatctagtcatt

SEQ ID NO: 33698 - RNA, 21 nt, synthetic construct
  source 1..21: mol_type = other RNA; note = Description of Artificial Sequence: Synthetic oligonucleotide
tgttcagtaaaatctagtctt

SEQ ID NO: 33699 - RNA, 21 nt, synthetic construct
  source 1..21: mol_type = other RNA; note = Description of Artificial Sequence: Synthetic oligonucleotide
tagttcagtaaaatctagttt

SEQ ID NO: 33700 - RNA, 21 nt, synthetic construct
  source 1..21: mol_type = other RNA; note = Description of Artificial Sequence: Synthetic oligonucleotide
ttagttcagtaaaatctagtt

SEQ ID NO: 33701 - RNA, 21 nt, synthetic construct
  source 1..21: mol_type = other RNA; note = Description of Artificial Sequence: Synthetic oligonucleotide
tatagttcagtaaaatctatt

SEQ ID NO: 33702 - RNA, 21 nt, synthetic construct
  source 1..21: mol_type = other RNA; note = Description of Artificial Sequence: Synthetic oligonucleotide
tcatagttcagtaaaatcttt

SEQ ID NO: 33703 - RNA, 21 nt, synthetic construct
  source 1..21: mol_type = other RNA; note = Description of Artificial Sequence: Synthetic oligonucleotide
ttcatagttcagtaaaatctt

SEQ ID NO: 33704 - RNA, 21 nt, synthetic construct
  source 1..21: mol_type = other RNA; note = Description of Artificial Sequence: Synthetic oligonucleotide
tttcatagttcagtaaaattt

SEQ ID NO: 33705 - RNA, 21 nt, synthetic construct
  source 1..21: mol_type = other RNA; note = Description of Artificial Sequence: Synthetic oligonucleotide
ttttcatagttcagtaaaatt

SEQ ID NO: 33706 - RNA, 21 nt, synthetic construct
  source 1..21: mol_type = other RNA; note = Description of Artificial Sequence: Synthetic oligonucleotide
tttttcatagttcagtaaatt

SEQ ID NO: 33707 - RNA, 21 nt, synthetic construct
  source 1..21: mol_type = other RNA; note = Description of Artificial Sequence: Synthetic oligonucleotide
tattttcatagttcagtaatt

SEQ ID NO: 33708 - RNA, 21 nt, synthetic construct
  source 1..21: mol_type = other RNA; note = Description of Artificial Sequence: Synthetic oligonucleotide
ttattttcatagttcagtatt

SEQ ID NO: 33709 - RNA, 21 nt, synthetic construct
  source 1..21: mol_type = other RNA; note = Description of Artificial Sequence: Synthetic oligonucleotide
tttattttcatagttcagttt

SEQ ID NO: 33710 - RNA, 21 nt, synthetic construct
  source 1..21: mol_type = other RNA; note = Description of Artificial Sequence: Synthetic oligonucleotide
ttttattttcatagttcagtt

SEQ ID NO: 33711 - RNA, 21 nt, synthetic construct
  source 1..21: mol_type = other RNA; note = Description of Artificial Sequence: Synthetic oligonucleotide
tatttattttcatagttcatt

SEQ ID NO: 33712 - RNA, 21 nt, synthetic construct
  source 1..21: mol_type = other RNA; note = Description of Artificial Sequence: Synthetic oligonucleotide
ttatttattttcatagttctt

SEQ ID NO: 33713 - RNA, 21 nt, synthetic construct
  source 1..21: mol_type = other RNA; note = Description of Artificial Sequence: Synthetic oligonucleotide
tgtatttattttcatagtttt

SEQ ID NO: 33714 - RNA, 21 nt, synthetic construct
  source 1..21: mol_type = other RNA; note = Description of Artificial Sequence: Synthetic oligonucleotide
ttgtatttattttcatagttt

SEQ ID NO: 33715 - RNA, 21 nt, synthetic construct
  source 1..21: mol_type = other RNA; note = Description of Artificial Sequence: Synthetic oligonucleotide
tgtgtatttattttcatagtt

SEQ ID NO: 33716 - RNA, 21 nt, synthetic construct
  source 1..21: mol_type = other RNA; note = Description of Artificial Sequence: Synthetic oligonucleotide
ttgtgtatttattttcatatt

SEQ ID NO: 33717 - RNA, 21 nt, synthetic construct
  source 1..21: mol_type = other RNA; note = Description of Artificial Sequence: Synthetic oligonucleotide
tatgtgtatttattttcattt

SEQ ID NO: 33718 - RNA, 21 nt, synthetic construct
  source 1..21: mol_type = other RNA; note = Description of Artificial Sequence: Synthetic oligonucleotide
ttatgtgtatttattttcatt

SEQ ID NO: 33719 - RNA, 21 nt, synthetic construct
  source 1..21: mol_type = other RNA; note = Description of Artificial Sequence: Synthetic oligonucleotide
tttatgtgtatttattttctt

SEQ ID NO: 33720 - RNA, 21 nt, synthetic construct
  source 1..21: mol_type = other RNA; note = Description of Artificial Sequence: Synthetic oligonucleotide
tattatgtgtatttatttttt

SEQ ID NO: 33721 - RNA, 21 nt, synthetic construct
  source 1..21: mol_type = other RNA; note = Description of Artificial Sequence: Synthetic oligonucleotide
taattatgtgtatttattttt

SEQ ID NO: 33722 - RNA, 21 nt, synthetic construct
  source 1..21: mol_type = other RNA; note = Description of Artificial Sequence: Synthetic oligonucleotide
taaattatgtgtatttatttt

SEQ ID NO: 33723 - RNA, 21 nt, synthetic construct
  source 1..21: mol_type = other RNA; note = Description of Artificial Sequence: Synthetic oligonucleotide
taaaattatgtgtatttattt

SEQ ID NO: 33724 - RNA, 21 nt, synthetic construct
  source 1..21: mol_type = other RNA; note = Description of Artificial Sequence: Synthetic oligonucleotide
taaaaattatgtgtatttatt

SEQ ID NO: 33725 - RNA, 21 nt, synthetic construct
  source 1..21: mol_type = other RNA; note = Description of Artificial Sequence: Synthetic oligonucleotide
tgaaaaattatgtgtattttt

SEQ ID NO: 33726 - RNA, 21 nt, synthetic construct
  source 1..21: mol_type = other RNA; note = Description of Artificial Sequence: Synthetic oligonucleotide
ttgaaaaattatgtgtatttt

SEQ ID NO: 33727 - RNA, 21 nt, synthetic construct
  source 1..21: mol_type = other RNA; note = Description of Artificial Sequence: Synthetic oligonucleotide
tgtgaaaaattatgtgtattt

SEQ ID NO: 33728 - RNA, 21 nt, synthetic construct
  source 1..21: mol_type = other RNA; note = Description of Artificial Sequence: Synthetic oligonucleotide
ttgtgaaaaattatgtgtatt

SEQ ID NO: 33729 - RNA, 21 nt, synthetic construct
  source 1..21: mol_type = other RNA; note = Description of Artificial Sequence: Synthetic oligonucleotide
tttgtgaaaaattatgtgttt

SEQ ID NO: 33730 - RNA, 21 nt, synthetic construct
  source 1..21: mol_type = other RNA; note = Description of Artificial Sequence: Synthetic oligonucleotide
ttttgtgaaaaattatgtgtt

SEQ ID NO: 33731 - RNA, 21 nt, synthetic construct
  source 1..21: mol_type = other RNA; note = Description of Artificial Sequence: Synthetic oligonucleotide
tttttgtgaaaaattatgttt

SEQ ID NO: 33732 - RNA, 21 nt, synthetic construct
  source 1..21: mol_type = other RNA; note = Description of Artificial Sequence: Synthetic oligonucleotide
tattttgtgaaaaattatgtt

SEQ ID NO: 33733 - RNA, 21 nt, synthetic construct
  source 1..21: mol_type = other RNA; note = Description of Artificial Sequence: Synthetic oligonucleotide
taattttgtgaaaaattattt

SEQ ID NO: 33734 - RNA, 21 nt, synthetic construct
  source 1..21: mol_type = other RNA; note = Description of Artificial Sequence: Synthetic oligonucleotide
taaattttgtgaaaaattatt

SEQ ID NO: 33735 - RNA, 21 nt, synthetic construct
  source 1..21: mol_type = other RNA; note = Description of Artificial Sequence: Synthetic oligonucleotide
taaaattttgtgaaaaatttt

SEQ ID NO: 33736 - RNA, 21 nt, synthetic construct
  source 1..21: mol_type = other RNA; note = Description of Artificial Sequence: Synthetic oligonucleotide
tcaaaattttgtgaaaaattt

SEQ ID NO: 33737 - RNA, 21 nt, synthetic construct
  source 1..21: mol_type = other RNA; note = Description of Artificial Sequence: Synthetic oligonucleotide
tccaaaattttgtgaaaaatt

SEQ ID NO: 33738 - RNA, 21 nt, synthetic construct
  source 1..21: mol_type = other RNA; note = Description of Artificial Sequence: Synthetic oligonucleotide
tcccaaaattttgtgaaaatt

SEQ ID NO: 33739 - RNA, 21 nt, synthetic construct
  source 1..21: mol_type = other RNA; note = Description of Artificial Sequence: Synthetic oligonucleotide
tgcccaaaattttgtgaaatt

SEQ ID NO: 33740 - RNA, 21 nt, synthetic construct
  source 1..21: mol_type = other RNA; note = Description of Artificial Sequence: Synthetic oligonucleotide
tggcccaaaattttgtgaatt

SEQ ID NO: 33741 - RNA, 21 nt, synthetic construct
  source 1..21: mol_type = other RNA; note = Description of Artificial Sequence: Synthetic oligonucleotide
tgggcccaaaattttgtgatt

SEQ ID NO: 33742 - RNA, 21 nt, synthetic construct
  source 1..21: mol_type = other RNA; note = Description of Artificial Sequence: Synthetic oligonucleotide
ttgggcccaaaattttgtgtt

SEQ ID NO: 33743 - RNA, 21 nt, synthetic construct
  source 1..21: mol_type = other RNA; note = Description of Artificial Sequence: Synthetic oligonucleotide
tttgggcccaaaattttgttt

SEQ ID NO: 33744 - RNA, 21 nt, synthetic construct
  source 1..21: mol_type = other RNA; note = Description of Artificial Sequence: Synthetic oligonucleotide
tattgggcccaaaattttgtt

SEQ ID NO: 33745 - RNA, 21 nt, synthetic construct
  source 1..21: mol_type = other RNA; note = Description of Artificial Sequence: Synthetic oligonucleotide
taattgggcccaaaatttttt

SEQ ID NO: 33746 - RNA, 21 nt, synthetic construct
  source 1..21: mol_type = other RNA; note = Description of Artificial Sequence: Synthetic oligonucleotide
tgaattgggcccaaaattttt

SEQ ID NO: 33747 - RNA, 21 nt, synthetic construct
  source 1..21: mol_type = other RNA; note = Description of Artificial Sequence: Synthetic oligonucleotide
tggaattgggcccaaaatttt

SEQ ID NO: 33748 - RNA, 21 nt, synthetic construct
  source 1..21: mol_type = other RNA; note = Description of Artificial Sequence: Synthetic oligonucleotide
tgggaattgggcccaaaattt

SEQ ID NO: 33749 - RNA, 21 nt, synthetic construct
  source 1..21: mol_type = other RNA; note = Description of Artificial Sequence: Synthetic oligonucleotide
tggggaattgggcccaaaatt

SEQ ID NO: 33750 - RNA, 21 nt, synthetic construct
  source 1..21: mol_type = other RNA; note = Description of Artificial Sequence: Synthetic oligonucleotide
taggggaattgggcccaaatt

SEQ ID NO: 33751 - RNA, 21 nt, synthetic construct
  source 1..21: mol_type = other RNA; note = Description of Artificial Sequence: Synthetic oligonucleotide
ttaggggaattgggcccaatt

SEQ ID NO: 33752 - RNA, 21 nt, synthetic construct
  source 1..21: mol_type = other RNA; note = Description of Artificial Sequence: Synthetic oligonucleotide
tttaggggaattgggcccatt

SEQ ID NO: 33753 - RNA, 21 nt, synthetic construct
  source 1..21: mol_type = other RNA; note = Description of Artificial Sequence: Synthetic oligonucleotide
ttttaggggaattgggccctt

SEQ ID NO: 33754 - RNA, 21 nt, synthetic construct
  source 1..21: mol_type = other RNA; note = Description of Artificial Sequence: Synthetic oligonucleotide
tttttaggggaattgggcctt

SEQ ID NO: 33755 - RNA, 21 nt, synthetic construct
  source 1..21: mol_type = other RNA; note = Description of Artificial Sequence: Synthetic oligonucleotide
tcttttaggggaattgggctt

SEQ ID NO: 33756 - RNA, 21 nt, synthetic construct
  source 1..21: mol_type = other RNA; note = Description of Artificial Sequence: Synthetic oligonucleotide
ttcttttaggggaattgggtt

SEQ ID NO: 33757 - RNA, 21 nt, synthetic construct
  source 1..21: mol_type = other RNA; note = Description of Artificial Sequence: Synthetic oligonucleotide
tttcttttaggggaattggtt

SEQ ID NO: 33758 - RNA, 21 nt, synthetic construct
  source 1..21: mol_type = other RNA; note = Description of Artificial Sequence: Synthetic oligonucleotide
tattcttttaggggaattgtt

SEQ ID NO: 33759 - RNA, 21 nt, synthetic construct
  source 1..21: mol_type = other RNA; note = Description of Artificial Sequence: Synthetic oligonucleotide
taattcttttaggggaatttt

SEQ ID NO: 33760 - RNA, 21 nt, synthetic construct
  source 1..21: mol_type = other RNA; note = Description of Artificial Sequence: Synthetic oligonucleotide
tcaattcttttaggggaattt

SEQ ID NO: 33761 - RNA, 21 nt, synthetic construct
  source 1..21: mol_type = other RNA; note = Description of Artificial Sequence: Synthetic oligonucleotide
ttcaattcttttaggggaatt

SEQ ID NO: 33762 - RNA, 21 nt, synthetic construct
  source 1..21: mol_type = other RNA; note = Description of Artificial Sequence: Synthetic oligonucleotide
tctcaattcttttaggggatt

SEQ ID NO: 33763 - RNA, 21 nt, synthetic construct
  source 1..21: mol_type = other RNA; note = Description of Artificial Sequence: Synthetic oligonucleotide
tcctcaattcttttaggggtt

SEQ ID NO: 33764 - RNA, 21 nt, synthetic construct
  source 1..21: mol_type = other RNA; note = Description of Artificial Sequence: Synthetic oligonucleotide
ttcctcaattcttttagggtt

SEQ ID NO: 33765 - RNA, 21 nt, synthetic construct
  source 1..21: mol_type = other RNA; note = Description of Artificial Sequence: Synthetic oligonucleotide
tatcctcaattcttttaggtt

SEQ ID NO: 33766 - RNA, 21 nt, synthetic construct
  source 1..21: mol_type = other RNA; note = Description of Artificial Sequence: Synthetic oligonucleotide
taatcctcaattcttttagtt

SEQ ID NO: 33767 - RNA, 21 nt, synthetic construct
  source 1..21: mol_type = other RNA; note = Description of Artificial Sequence: Synthetic oligonucleotide
ttaatcctcaattcttttatt

SEQ ID NO: 33768 - RNA, 21 nt, synthetic construct
  source 1..21: mol_type = other RNA; note = Description of Artificial Sequence: Synthetic oligonucleotide
tctaatcctcaattctttttt

SEQ ID NO: 33769 - RNA, 21 nt, synthetic construct
  source 1..21: mol_type = other RNA; note = Description of Artificial Sequence: Synthetic oligonucleotide
tcctaatcctcaattcttttt

SEQ ID NO: 33770 - RNA, 21 nt, synthetic construct
  source 1..21: mol_type = other RNA; note = Description of Artificial Sequence: Synthetic oligonucleotide
tccctaatcctcaattctttt

SEQ ID NO: 33771 - RNA, 21 nt, synthetic construct
  source 1..21: mol_type = other RNA; note = Description of Artificial Sequence: Synthetic oligonucleotide
ttccctaatcctcaattcttt

SEQ ID NO: 33772 - RNA, 21 nt, synthetic construct
  source 1..21: mol_type = other RNA; note = Description of Artificial Sequence: Synthetic oligonucleotide
tctccctaatcctcaattctt

SEQ ID NO: 33773 - RNA, 21 nt, synthetic construct
  source 1..21: mol_type = other RNA; note = Description of Artificial Sequence: Synthetic oligonucleotide
ttctccctaatcctcaatttt

SEQ ID NO: 33774 - RNA, 21 nt, synthetic construct
  source 1..21: mol_type = other RNA; note = Description of Artificial Sequence: Synthetic oligonucleotide
tttctccctaatcctcaattt

SEQ ID NO: 33775 - RNA, 21 nt, synthetic construct
  source 1..21: mol_type = other RNA; note = Description of Artificial Sequence: Synthetic oligonucleotide
ttttctccctaatcctcaatt

SEQ ID NO: 33776 - RNA, 21 nt, synthetic construct
  source 1..21: mol_type = other RNA; note = Description of Artificial Sequence: Synthetic oligonucleotide
tctttctccctaatcctcatt

SEQ ID NO: 33777 - RNA, 21 nt, synthetic construct
  source 1..21: mol_type = other RNA; note = Description of Artificial Sequence: Synthetic oligonucleotide
tcctttctccctaatcctctt

SEQ ID NO: 33778 - RNA, 21 nt, synthetic construct
  source 1..21: mol_type = other RNA; note = Description of Artificial Sequence: Synthetic oligonucleotide
ttcctttctccctaatccttt

SEQ ID NO: 33779 - RNA, 21 nt, synthetic construct
  source 1..21: mol_type = other RNA; note = Description of Artificial Sequence: Synthetic oligonucleotide
tctcctttctccctaatcctt

SEQ ID NO: 33780 - RNA, 21 nt, synthetic construct
  source 1..21: mol_type = other RNA; note = Description of Artificial Sequence: Synthetic oligonucleotide
ttctcctttctccctaatctt

SEQ ID NO: 33781 - RNA, 21 nt, synthetic construct
  source 1..21: mol_type = other RNA; note = Description of Artificial Sequence: Synthetic oligonucleotide
tgtctcctttctccctaattt

SEQ ID NO: 33782 - RNA, 21 nt, synthetic construct
  source 1..21: mol_type = other RNA; note = Description of Artificial Sequence: Synthetic oligonucleotide
ttgtctcctttctccctaatt

SEQ ID NO: 33783 - RNA, 21 nt, synthetic construct
  source 1..21: mol_type = other RNA; note = Description of Artificial Sequence: Synthetic oligonucleotide
tttgtctcctttctccctatt

SEQ ID NO: 33784 - RNA, 21 nt, synthetic construct
  source 1..21: mol_type = other RNA; note = Description of Artificial Sequence: Synthetic oligonucleotide
tgttgtctcctttctcccttt

SEQ ID NO: 33785 - RNA, 21 nt, synthetic construct
  source 1..21: mol_type = other RNA; note = Description of Artificial Sequence: Synthetic oligonucleotide
tagttgtctcctttctccctt

SEQ ID NO: 33786 - RNA, 21 nt, synthetic construct
  source 1..21: mol_type = other RNA; note = Description of Artificial Sequence: Synthetic oligonucleotide
tgagttgtctcctttctcctt

SEQ ID NO: 33787 - RNA, 21 nt, synthetic construct
  source 1..21: mol_type = other RNA; note = Description of Artificial Sequence: Synthetic oligonucleotide
ttgagttgtctcctttctctt

SEQ ID NO: 33788 - RNA, 21 nt, synthetic construct
  source 1..21: mol_type = other RNA; note = Description of Artificial Sequence: Synthetic oligonucleotide
tttgagttgtctcctttcttt

SEQ ID NO: 33789 - RNA, 21 nt, synthetic construct
  source 1..21: mol_type = other RNA; note = Description of Artificial Sequence: Synthetic oligonucleotide
ttttgagttgtctcctttctt

SEQ ID NO: 33790 - RNA, 21 nt, synthetic construct
  source 1..21: mol_type = other RNA; note = Description of Artificial Sequence: Synthetic oligonucleotide
tctttgagttgtctccttttt

SEQ ID NO: 33791 - RNA, 21 nt, synthetic construct
  source 1..21: mol_type = other RNA; note = Description of Artificial Sequence: Synthetic oligonucleotide
tactttgagttgtctcctttt

SEQ ID NO: 33792 - RNA, 21 nt, synthetic construct
  source 1..21: mol_type = other RNA; note = Description of Artificial Sequence: Synthetic oligonucleotide
tgactttgagttgtctccttt

SEQ ID NO: 33793 - RNA, 21 nt, synthetic construct
  source 1..21: mol_type = other RNA; note = Description of Artificial Sequence: Synthetic oligonucleotide
ttgactttgagttgtctcctt

SEQ ID NO: 33794 - RNA, 21 nt, synthetic construct
  source 1..21: mol_type = other RNA; note = Description of Artificial Sequence: Synthetic oligonucleotide
tatgactttgagttgtctctt

SEQ ID NO: 33795 - RNA, 21 nt, synthetic construct
  source 1..21: mol_type = other RNA; note = Description of Artificial Sequence: Synthetic oligonucleotide
tgatgactttgagttgtcttt

SEQ ID NO: 33796 - RNA, 21 nt, synthetic construct
  source 1..21: mol_type = other RNA; note = Description of Artificial Sequence: Synthetic oligonucleotide
tggatgactttgagttgtctt

SEQ ID NO: 33797 - RNA, 21 nt, synthetic construct
  source 1..21: mol_type = other RNA; note = Description of Artificial Sequence: Synthetic oligonucleotide
tgggatgactttgagttgttt

SEQ ID NO: 33798 - RNA, 21 nt, synthetic construct
  source 1..21: mol_type = other RNA; note = Description of Artificial Sequence: Synthetic oligonucleotide
ttgggatgactttgagttgtt

SEQ ID NO: 33799 - RNA, 21 nt, synthetic construct
  source 1..21: mol_type = other RNA; note = Description of Artificial Sequence: Synthetic oligonucleotide
tatgggatgactttgagtttt

SEQ ID NO: 33800 - RNA, 21 nt, synthetic construct
  source 1..21: mol_type = other RNA; note = Description of Artificial Sequence: Synthetic oligonucleotide
taatgggatgactttgagttt

SEQ ID NO: 33801 - RNA, 21 nt, synthetic construct
  source 1..21: mol_type = other RNA; note = Description of Artificial Sequence: Synthetic oligonucleotide
ttaatgggatgactttgagtt

SEQ ID NO: 33802 - RNA, 21 nt, synthetic construct
  source 1..21: mol_type = other RNA; note = Description of Artificial Sequence: Synthetic oligonucleotide
tttaatgggatgactttgatt

SEQ ID NO: 33803 - RNA, 21 nt, synthetic construct
  source 1..21: mol_type = other RNA; note = Description of Artificial Sequence: Synthetic oligonucleotide
tcttaatgggatgactttgtt

SEQ ID NO: 33804 - RNA, 21 nt, synthetic construct
  source 1..21: mol_type = other RNA; note = Description of Artificial Sequence: Synthetic oligonucleotide
tacttaatgggatgacttttt

SEQ ID NO: 33805 - RNA, 21 nt, synthetic construct
  source 1..21: mol_type = other RNA; note = Description of Artificial Sequence: Synthetic oligonucleotide
tcacttaatgggatgactttt

SEQ ID NO: 33806 - RNA, 21 nt, synthetic construct
  source 1..21: mol_type = other RNA; note = Description of Artificial Sequence: Synthetic oligonucleotide
tgcacttaatgggatgacttt

SEQ ID NO: 33807 - RNA, 21 nt, synthetic construct
  source 1..21: mol_type = other RNA; note = Description of Artificial Sequence: Synthetic oligonucleotide
ttgcacttaatgggatgactt

SEQ ID NO: 33808 - RNA, 21 nt, synthetic construct
  source 1..21: mol_type = other RNA; note = Description of Artificial Sequence: Synthetic oligonucleotide
tctgcacttaatgggatgatt

SEQ ID NO: 33809 - RNA, 21 nt, synthetic construct
  source 1..21: mol_type = other RNA; note = Description of Artificial Sequence: Synthetic oligonucleotide
tactgcacttaatgggatgtt

SEQ ID NO: 33810 - RNA, 21 nt, synthetic construct
  source 1..21: mol_type = other RNA; note = Description of Artificial Sequence: Synthetic oligonucleotide
taactgcacttaatgggattt

SEQ ID NO: 33811 - RNA, 21 nt, synthetic construct
  source 1..21: mol_type = other RNA; note = Description of Artificial Sequence: Synthetic oligonucleotide
taaactgcacttaatgggatt

SEQ ID NO: 33812 - RNA, 21 nt, synthetic construct
  source 1..21: mol_type = other RNA; note = Description of Artificial Sequence: Synthetic oligonucleotide
tgaaactgcacttaatgggtt

SEQ ID NO: 33813 - RNA, 21 nt, synthetic construct
  source 1..21: mol_type = other RNA; note = Description of Artificial Sequence: Synthetic oligonucleotide
tagaaactgcacttaatggtt

SEQ ID NO: 33814 - RNA, 21 nt, synthetic construct
  source 1..21: mol_type = other RNA; note = Description of Artificial Sequence: Synthetic oligonucleotide
taagaaactgcacttaatgtt

SEQ ID NO: 33815 - RNA, 21 nt, synthetic construct
  source 1..21: mol_type = other RNA; note = Description of Artificial Sequence: Synthetic oligonucleotide
taaagaaactgcacttaattt

SEQ ID NO: 33816 - RNA, 21 nt, synthetic construct
  source 1..21: mol_type = other RNA; note = Description of Artificial Sequence: Synthetic oligonucleotide
tcaaagaaactgcacttaatt

SEQ ID NO: 33817 - RNA, 21 nt, synthetic construct
  source 1..21: mol_type = other RNA; note = Description of Artificial Sequence: Synthetic oligonucleotide
ttcaaagaaactgcacttatt

SEQ ID NO: 33818 - RNA, 21 nt, synthetic construct
  source 1..21: mol_type = other RNA; note = Description of Artificial Sequence: Synthetic oligonucleotide
tttcaaagaaactgcactttt

SEQ ID NO: 33819 - RNA, 21 nt, synthetic construct
  source 1..21: mol_type = other RNA; note = Description of Artificial Sequence: Synthetic oligonucleotide
tattcaaagaaactgcacttt

SEQ ID NO: 33820 - RNA, 21 nt, synthetic construct
  source 1..21: mol_type = other RNA; note = Description of Artificial Sequence: Synthetic oligonucleotide
tgattcaaagaaactgcactt

SEQ ID NO: 33821 - RNA, 21 nt, synthetic construct
  source 1..21: mol_type = other RNA; note = Description of Artificial Sequence: Synthetic oligonucleotide
tagattcaaagaaactgcatt

SEQ ID NO: 33822 - RNA, 21 nt, synthetic construct
  source 1..21: mol_type = other RNA; note = Description of Artificial Sequence: Synthetic oligonucleotide
taagattcaaagaaactgctt

SEQ ID NO: 33823 - RNA, 21 nt, synthetic construct
  source 1..21: mol_type = other RNA; note = Description of Artificial Sequence: Synthetic oligonucleotide
tgaagattcaaagaaactgtt

SEQ ID NO: 33824 - RNA, 21 nt, synthetic construct
  source 1..21: mol_type = other RNA; note = Description of Artificial Sequence: Synthetic oligonucleotide
tagaagattcaaagaaacttt

SEQ ID NO: 33825 - RNA, 21 nt, synthetic construct
  source 1..21: mol_type = other RNA; note = Description of Artificial Sequence: Synthetic oligonucleotide
tcagaagattcaaagaaactt

SEQ ID NO: 33826 - RNA, 21 nt, synthetic construct
  source 1..21: mol_type = other RNA; note = Description of Artificial Sequence: Synthetic oligonucleotide
tgcagaagattcaaagaaatt

SEQ ID NO: 33827 - RNA, 21 nt, synthetic construct
  source 1..21: mol_type = other RNA; note = Description of Artificial Sequence: Synthetic oligonucleotide
tagcagaagattcaaagaatt

SEQ ID NO: 33828 - RNA, 21 nt, synthetic construct
  source 1..21: mol_type = other RNA; note = Description of Artificial Sequence: Synthetic oligonucleotide
taagcagaagattcaaagatt

SEQ ID NO: 33829 - RNA, 21 nt, synthetic construct
  source 1..21: mol_type = other RNA; note = Description of Artificial Sequence: Synthetic oligonucleotide
taaagcagaagattcaaagtt

SEQ ID NO: 33830 - RNA, 21 nt, synthetic construct
  source 1..21: mol_type = other RNA; note = Description of Artificial Sequence: Synthetic oligonucleotide
ttaaagcagaagattcaaatt

SEQ ID NO: 33831 - RNA, 21 nt, synthetic construct
  source 1..21: mol_type = other RNA; note = Description of Artificial Sequence: Synthetic oligonucleotide
tataaagcagaagattcaatt

SEQ ID NO: 33832 - RNA, 21 nt, synthetic construct
  source 1..21: mol_type = other RNA; note = Description of Artificial Sequence: Synthetic oligonucleotide
tgataaagcagaagattcatt

SEQ ID NO: 33833 - RNA, 21 nt, synthetic construct
  source 1..21: mol_type = other RNA; note = Description of Artificial Sequence: Synthetic oligonucleotide
tagataaagcagaagattctt

SEQ ID NO: 33834 - RNA, 21 nt, synthetic construct
  source 1..21: mol_type = other RNA; note = Description of Artificial Sequence: Synthetic oligonucleotide
taagataaagcagaagatttt

SEQ ID NO: 33835 - RNA, 21 nt, synthetic construct
  source 1..21: mol_type = other RNA; note = Description of Artificial Sequence: Synthetic oligonucleotide
taaagataaagcagaagattt

SEQ ID NO: 33836 - RNA, 21 nt, synthetic construct
  source 1..21: mol_type = other RNA; note = Description of Artificial Sequence: Synthetic oligonucleotide
ttaaagataaagcagaagatt

SEQ ID NO: 33837 - RNA, 21 nt, synthetic construct
  source 1..21: mol_type = other RNA; note = Description of Artificial Sequence: Synthetic oligonucleotide
tttaaagataaagcagaagtt

SEQ ID NO: 33838 - RNA, 21 nt, synthetic construct
  source 1..21: mol_type = other RNA; note = Description of Artificial Sequence: Synthetic oligonucleotide
ttttaaagataaagcagaatt

SEQ ID NO: 33839 - RNA, 21 nt, synthetic construct
  source 1..21: mol_type = other RNA; note = Description of Artificial Sequence: Synthetic oligonucleotide
tttttaaagataaagcagatt

SEQ ID NO: 33840 - RNA, 21 nt, synthetic construct
  source 1..21: mol_type = other RNA; note = Description of Artificial Sequence: Synthetic oligonucleotide
ttttttaaagataaagcagtt

SEQ ID NO: 33841 - RNA, 21 nt, synthetic construct
  source 1..21: mol_type = other RNA; note = Description of Artificial Sequence: Synthetic oligonucleotide
tatttttaaagataaagcatt

SEQ ID NO: 33842 - RNA, 21 nt, synthetic construct
  source 1..21: mol_type = other RNA; note = Description of Artificial Sequence: Synthetic oligonucleotide
taatttttaaagataaagctt

SEQ ID NO: 33843 - RNA, 21 nt, synthetic construct
  source 1..21: mol_type = other RNA; note = Description of Artificial Sequence: Synthetic oligonucleotide
taaatttttaaagataaagtt

SEQ ID NO: 33844 - RNA, 21 nt, synthetic construct
  source 1..21: mol_type = other RNA; note = Description of Artificial Sequence: Synthetic oligonucleotide
tcaaatttttaaagataaatt

SEQ ID NO: 33845 - RNA, 21 nt, synthetic construct
  source 1..21: mol_type = other RNA; note = Description of Artificial Sequence: Synthetic oligonucleotide
tacaaatttttaaagataatt

SEQ ID NO: 33846 - RNA, 21 nt, synthetic construct
  source 1..21: mol_type = other RNA; note = Description of Artificial Sequence: Synthetic oligonucleotide
ttacaaatttttaaagatatt

SEQ ID NO: 33847 - RNA, 21 nt, synthetic construct
  source 1..21: mol_type = other RNA; note = Description of Artificial Sequence: Synthetic oligonucleotide
tatacaaatttttaaagattt

SEQ ID NO: 33848 - RNA, 21 nt, synthetic construct
  source 1..21: mol_type = other RNA; note = Description of Artificial Sequence: Synthetic oligonucleotide
ttatacaaatttttaaagatt

SEQ ID NO: 33849 - RNA, 21 nt, synthetic construct
  source 1..21: mol_type = other RNA; note = Description of Artificial Sequence: Synthetic oligonucleotide
tttatacaaatttttaaagtt

SEQ ID NO: 33850 - RNA, 21 nt, synthetic construct
  source 1..21: mol_type = other RNA; note = Description of Artificial Sequence: Synthetic oligonucleotide
tattatacaaatttttaaatt

SEQ ID NO: 33851 - RNA, 21 nt, synthetic construct
  source 1..21: mol_type = other RNA; note = Description of Artificial Sequence: Synthetic oligonucleotide
taattatacaaatttttaatt

SEQ ID NO: 33852 - RNA, 21 nt, synthetic construct
  source 1..21: mol_type = other RNA; note = Description of Artificial Sequence: Synthetic oligonucleotide
taaattatacaaatttttatt

SEQ ID NO: 33853 - RNA, 21 nt, synthetic construct
  source 1..21: mol_type = other RNA; note = Description of Artificial Sequence: Synthetic oligonucleotide
ttaaattatacaaattttttt

SEQ ID NO: 33854 - RNA, 21 nt, synthetic construct
  source 1..21: mol_type = other RNA; note = Description of Artificial Sequence: Synthetic oligonucleotide
tataaattatacaaatttttt

SEQ ID NO: 33855 - RNA, 21 nt, synthetic construct
  source 1..21: mol_type = other RNA; note = Description of Artificial Sequence: Synthetic oligonucleotide
ttataaattatacaaattttt

SEQ ID NO: 33856 - RNA, 21 nt, synthetic construct
  source 1..21: mol_type = other RNA; note = Description of Artificial Sequence: Synthetic oligonucleotide
tatataaattatacaaatttt

SEQ ID NO: 33857 - RNA, 21 nt, synthetic construct
  source 1..21: mol_type = other RNA; note = Description of Artificial Sequence: Synthetic oligonucleotide
ttatataaattatacaaattt

SEQ ID NO: 33858 - RNA, 21 nt, synthetic construct
  source 1..21: mol_type = other RNA; note = Description of Artificial Sequence: Synthetic oligonucleotide
tatatataaattatacaaatt

SEQ ID NO: 33859 - RNA, 21 nt, synthetic construct
  source 1..21: mol_type = other RNA; note = Description of Artificial Sequence: Synthetic oligonucleotide
taatatataaattatacaatt

SEQ ID NO: 33860 - RNA, 21 nt, synthetic construct
  source 1..21: mol_type = other RNA; note = Description of Artificial Sequence: Synthetic oligonucleotide
taaatatataaattatacatt

SEQ ID NO: 33861 - RNA, 21 nt, synthetic construct
  source 1..21: mol_type = other RNA; note = Description of Artificial Sequence: Synthetic oligonucleotide
taaaatatataaattatactt

SEQ ID NO: 33862 - RNA, 21 nt, synthetic construct
  source 1..21: mol_type = other RNA; note = Description of Artificial Sequence: Synthetic oligonucleotide
ttaaaatatataaattatatt

SEQ ID NO: 33863 - RNA, 21 nt, synthetic construct
  source 1..21: mol_type = other RNA; note = Description of Artificial Sequence: Synthetic oligonucleotide
tataaaatatataaattattt

SEQ ID NO: 33864 - RNA, 21 nt, synthetic construct
  source 1..21: mol_type = other RNA; note = Description of Artificial Sequence: Synthetic oligonucleotide
taataaaatatataaattatt

SEQ ID NO: 33865 - RNA, 21 nt, synthetic construct
  source 1..21: mol_type = other RNA; note = Description of Artificial Sequence: Synthetic oligonucleotide
tgaataaaatatataaatttt

SEQ ID NO: 33866 - RNA, 21 nt, synthetic construct
  source 1..21: mol_type = other RNA; note = Description of Artificial Sequence: Synthetic oligonucleotide
tagaataaaatatataaattt

SEQ ID NO: 33867 - RNA, 21 nt, synthetic construct
  source 1..21: mol_type = other RNA; note = Description of Artificial Sequence: Synthetic oligonucleotide
ttagaataaaatatataaatt

SEQ ID NO: 33868 - RNA, 21 nt, synthetic construct
  source 1..21: mol_type = other RNA; note = Description of Artificial Sequence: Synthetic oligonucleotide
tatagaataaaatatataatt

SEQ ID NO: 33869 - RNA, 21 nt, synthetic construct
  source 1..21: mol_type = other RNA; note = Description of Artificial Sequence: Synthetic oligonucleotide
tcatagaataaaatatatatt

SEQ ID NO: 33870 - RNA, 21 nt, synthetic construct
  source 1..21: mol_type = other RNA; note = Description of Artificial Sequence: Synthetic oligonucleotide
tacatagaataaaatatattt

SEQ ID NO: 33871 - RNA, 21 nt, synthetic construct
  source 1..21: mol_type = other RNA; note = Description of Artificial Sequence: Synthetic oligonucleotide
tcacatagaataaaatatatt

SEQ ID NO: 33872 - RNA, 21 nt, synthetic construct
  source 1..21: mol_type = other RNA; note = Description of Artificial Sequence: Synthetic oligonucleotide
tacacatagaataaaatattt

SEQ ID NO: 33873 - RNA, 21 nt, synthetic construct
  source 1..21: mol_type = other RNA; note = Description of Artificial Sequence: Synthetic oligonucleotide
taacacatagaataaaatatt

SEQ ID NO: 33874 - RNA, 21 nt, synthetic construct
  source 1..21: mol_type = other RNA; note = Description of Artificial Sequence: Synthetic oligonucleotide
tgaacacatagaataaaattt

SEQ ID NO: 33875 - RNA, 21 nt, synthetic construct
  source 1..21: mol_type = other RNA; note = Description of Artificial Sequence: Synthetic oligonucleotide
tggaacacatagaataaaatt

SEQ ID NO: 33876 - RNA, 21 nt, synthetic construct
  source 1..21: mol_type = other RNA; note = Description of Artificial Sequence: Synthetic oligonucleotide
ttggaacacatagaataaatt

SEQ ID NO: 33877 - RNA, 21 nt, synthetic construct
  source 1..21: mol_type = other RNA; note = Description of Artificial Sequence: Synthetic oligonucleotide
tatggaacacatagaataatt

SEQ ID NO: 33878 - RNA, 21 nt, synthetic construct
  source 1..21: mol_type = other RNA; note = Description of Artificial Sequence: Synthetic oligonucleotide
ttatggaacacatagaatatt

SEQ ID NO: 33879 - RNA, 21 nt, synthetic construct
  source 1..21: mol_type = other RNA; note = Description of Artificial Sequence: Synthetic oligonucleotide
tctatggaacacatagaattt

SEQ ID NO: 33880 - RNA, 21 nt, synthetic construct
  source 1..21: mol_type = other RNA; note = Description of Artificial Sequence: Synthetic oligonucleotide
ttctatggaacacatagaatt

SEQ ID NO: 33881 - RNA, 21 nt, synthetic construct
  source 1..21: mol_type = other RNA; note = Description of Artificial Sequence: Synthetic oligonucleotide
tatctatggaacacatagatt

SEQ ID NO: 33882 - RNA, 21 nt, synthetic construct
  source 1..21: mol_type = other RNA; note = Description of Artificial Sequence: Synthetic oligonucleotide
ttatctatggaacacatagtt

SEQ ID NO: 33883 - RNA, 21 nt, synthetic construct
  source 1..21: mol_type = other RNA; note = Description of Artificial Sequence: Synthetic oligonucleotide
tatatctatggaacacatatt

SEQ ID NO: 33884 - RNA, 21 nt, synthetic construct
  source 1..21: mol_type = other RNA; note = Description of Artificial Sequence: Synthetic oligonucleotide
tgatatctatggaacacattt

SEQ ID NO: 33885 - RNA, 21 nt, synthetic construct
  source 1..21: mol_type = other RNA; note = Description of Artificial Sequence: Synthetic oligonucleotide
tagatatctatggaacacatt

SEQ ID NO: 33886 - RNA, 21 nt, synthetic construct
  source 1..21: mol_type = other RNA; note = Description of Artificial Sequence: Synthetic oligonucleotide
taagatatctatggaacactt

SEQ ID NO: 33887 - RNA, 21 nt, synthetic construct
  source 1..21: mol_type = other RNA; note = Description of Artificial Sequence: Synthetic oligonucleotide
ttaagatatctatggaacatt

SEQ ID NO: 33888 - RNA, 21 nt, synthetic construct
  source 1..21: mol_type = other RNA; note = Description of Artificial Sequence: Synthetic oligonucleotide
tttaagatatctatggaactt

SEQ ID NO: 33889 - RNA, 21 nt, synthetic construct
  source 1..21: mol_type = other RNA; note = Description of Artificial Sequence: Synthetic oligonucleotide
tattaagatatctatggaatt

SEQ ID NO: 33890 - RNA, 21 nt, synthetic construct
  source 1..21: mol_type = other RNA; note = Description of Artificial Sequence: Synthetic oligonucleotide
tcattaagatatctatggatt

SEQ ID NO: 33891 - RNA, 21 nt, synthetic construct
  source 1..21: mol_type = other RNA; note = Description of Artificial Sequence: Synthetic oligonucleotide
tacattaagatatctatggtt

SEQ ID NO: 33892 - RNA, 21 nt, synthetic construct
  source 1..21: mol_type = other RNA; note = Description of Artificial Sequence: Synthetic oligonucleotide
ttacattaagatatctatgtt

SEQ ID NO: 33893 - RNA, 21 nt, synthetic construct
  source 1..21: mol_type = other RNA; note = Description of Artificial Sequence: Synthetic oligonucleotide
tttacattaagatatctattt

SEQ ID NO: 33894 - RNA, 21 nt, synthetic construct
  source 1..21: mol_type = other RNA; note = Description of Artificial Sequence: Synthetic oligonucleotide
ttttacattaagatatctatt

SEQ ID NO: 33895 - RNA, 21 nt, synthetic construct
  source 1..21: mol_type = other RNA; note = Description of Artificial Sequence: Synthetic oligonucleotide
tttttacattaagatatcttt

SEQ ID NO: 33896 - RNA, 21 nt, synthetic construct
  source 1..21: mol_type = other RNA; note = Description of Artificial Sequence: Synthetic oligonucleotide
tattttacattaagatatctt

SEQ ID NO: 33897 - RNA, 21 nt, synthetic construct
  source 1..21: mol_type = other RNA; note = Description of Artificial Sequence: Synthetic oligonucleotide
taattttacattaagatattt

SEQ ID NO: 33898 - RNA, 21 nt, synthetic construct
  source 1..21: mol_type = other RNA; note = Description of Artificial Sequence: Synthetic oligonucleotide
ttaattttacattaagatatt

SEQ ID NO: 33899 - RNA, 21 nt, synthetic construct
  source 1..21: mol_type = other RNA; note = Description of Artificial Sequence: Synthetic oligonucleotide
tctaattttacattaagattt

SEQ ID NO: 33900 - RNA, 21 nt, synthetic construct
  source 1..21: mol_type = other RNA; note = Description of Artificial Sequence: Synthetic oligonucleotide
tactaattttacattaagatt

SEQ ID NO: 33901 - RNA, 21 nt, synthetic construct
  source 1..21: mol_type = other RNA; note = Description of Artificial Sequence: Synthetic oligonucleotide
tgactaattttacattaagtt

SEQ ID NO: 33902 - RNA, 21 nt, synthetic construct
  source 1..21: mol_type = other RNA; note = Description of Artificial Sequence: Synthetic oligonucleotide
ttgactaattttacattaatt

SEQ ID NO: 33903 - RNA, 21 nt, synthetic construct
  source 1..21: mol_type = other RNA; note = Description of Artificial Sequence: Synthetic oligonucleotide
tatgactaattttacattatt

SEQ ID NO: 33904 - RNA, 21 nt, synthetic construct
  source 1..21: mol_type = other RNA; note = Description of Artificial Sequence: Synthetic oligonucleotide
taatgactaattttacatttt

SEQ ID NO: 33905 - RNA, 21 nt, synthetic construct
  source 1..21: mol_type = other RNA; note = Description of Artificial Sequence: Synthetic oligonucleotide
taaatgactaattttacattt

SEQ ID NO: 33906 - RNA, 21 nt, synthetic construct
  source 1..21: mol_type = other RNA; note = Description of Artificial Sequence: Synthetic oligonucleotide
ttaaatgactaattttacatt

SEQ ID NO: 33907 - RNA, 21 nt, synthetic construct
  source 1..21: mol_type = other RNA; note = Description of Artificial Sequence: Synthetic oligonucleotide
tttaaatgactaattttactt

SEQ ID NO: 33908 - RNA, 21 nt, synthetic construct
  source 1..21: mol_type = other RNA; note = Description of Artificial Sequence: Synthetic oligonucleotide
ttttaaatgactaattttatt

SEQ ID NO: 33909 - RNA, 21 nt, synthetic construct
  source 1..21: mol_type = other RNA; note = Description of Artificial Sequence: Synthetic oligonucleotide
tatttaaatgactaatttttt

SEQ ID NO: 33910 - RNA, 21 nt, synthetic construct
  source 1..21: mol_type = other RNA; note = Description of Artificial Sequence: Synthetic oligonucleotide
taatttaaatgactaattttt

SEQ ID NO: 33911 - RNA, 21 nt, synthetic construct
  source 1..21: mol_type = other RNA; note = Description of Artificial Sequence: Synthetic oligonucleotide
ttaatttaaatgactaatttt

SEQ ID NO: 33912 - RNA, 21 nt, synthetic construct
  source 1..21: mol_type = other RNA; note = Description of Artificial Sequence: Synthetic oligonucleotide
tgtaatttaaatgactaattt

SEQ ID NO: 33913 - RNA, 21 nt, synthetic construct
  source 1..21: mol_type = other RNA; note = Description of Artificial Sequence: Synthetic oligonucleotide
ttgtaatttaaatgactaatt

SEQ ID NO: 33914 - RNA, 21 nt, synthetic construct
  source 1..21: mol_type = other RNA; note = Description of Artificial Sequence: Synthetic oligonucleotide
tgtgtaatttaaatgactatt

SEQ ID NO: 33915 - RNA, 21 nt, synthetic construct
  source 1..21: mol_type = other RNA; note = Description of Artificial Sequence: Synthetic oligonucleotide
tagtgtaatttaaatgacttt

SEQ ID NO: 33916 - RNA, 21 nt, synthetic construct
  source 1..21: mol_type = other RNA; note = Description of Artificial Sequence: Synthetic oligonucleotide
tcagtgtaatttaaatgactt

SEQ ID NO: 33917 - RNA, 21 nt, synthetic construct
  source 1..21: mol_type = other RNA; note = Description of Artificial Sequence: Synthetic oligonucleotide
tacagtgtaatttaaatgatt

SEQ ID NO: 33918 - RNA, 21 nt, synthetic construct
  source 1..21: mol_type = other RNA; note = Description of Artificial Sequence: Synthetic oligonucleotide
tgacagtgtaatttaaatgtt

SEQ ID NO: 33919 - RNA, 21 nt, synthetic construct
  source 1..21: mol_type = other RNA; note = Description of Artificial Sequence: Synthetic oligonucleotide
ttgacagtgtaatttaaattt

SEQ ID NO: 33920 - RNA, 21 nt, synthetic construct
  source 1..21: mol_type = other RNA; note = Description of Artificial Sequence: Synthetic oligonucleotide
tttgacagtgtaatttaaatt

SEQ ID NO: 33921 - RNA, 21 nt, synthetic construct
  source 1..21: mol_type = other RNA; note = Description of Artificial Sequence: Synthetic oligonucleotide
tattgacagtgtaatttaatt

SEQ ID NO: 33922 - RNA, 21 nt, synthetic construct
  source 1..21: mol_type = other RNA; note = Description of Artificial Sequence: Synthetic oligonucleotide
taattgacagtgtaatttatt

SEQ ID NO: 33923 - RNA, 21 nt, synthetic construct
  source 1..21: mol_type = other RNA; note = Description of Artificial Sequence: Synthetic oligonucleotide
ttaattgacagtgtaattttt

SEQ ID NO: 33924 - RNA, 21 nt, synthetic construct
  source 1..21: mol_type = other RNA; note = Description of Artificial Sequence: Synthetic oligonucleotide
tttaattgacagtgtaatttt

SEQ ID NO: 33925 - RNA, 21 nt, synthetic construct
  source 1..21: mol_type = other RNA; note = Description of Artificial Sequence: Synthetic oligonucleotide
ttttaattgacagtgtaattt

SEQ ID NO: 33926 - RNA, 21 nt, synthetic construct
  source 1..21: mol_type = other RNA; note = Description of Artificial Sequence: Synthetic oligonucleotide
tttttaattgacagtgtaatt

SEQ ID NO: 33927 - RNA, 21 nt, synthetic construct
  source 1..21: mol_type = other RNA; note = Description of Artificial Sequence: Synthetic oligonucleotide
tcttttaattgacagtgtatt

SEQ ID NO: 33928 - RNA, 21 nt, synthetic construct
  source 1..21: mol_type = other RNA; note = Description of Artificial Sequence: Synthetic oligonucleotide
tacttttaattgacagtgttt

SEQ ID NO: 33929 - RNA, 21 nt, synthetic construct
  source 1..21: mol_type = other RNA; note = Description of Artificial Sequence: Synthetic oligonucleotide
ttacttttaattgacagtgtt

SEQ ID NO: 33930 - RNA, 21 nt, synthetic construct
  source 1..21: mol_type = other RNA; note = Description of Artificial Sequence: Synthetic oligonucleotide
tttacttttaattgacagttt

SEQ ID NO: 33931 - RNA, 21 nt, synthetic construct
  source 1..21: mol_type = other RNA; note = Description of Artificial Sequence: Synthetic oligonucleotide
tattacttttaattgacagtt

SEQ ID NO: 33932 - RNA, 21 nt, synthetic construct
  source 1..21: mol_type = other RNA; note = Description of Artificial Sequence: Synthetic oligonucleotide
tcattacttttaattgacatt

SEQ ID NO: 33933 - RNA, 21 nt, synthetic construct
  source 1..21: mol_type = other RNA; note = Description of Artificial Sequence: Synthetic oligonucleotide
tccattacttttaattgactt

SEQ ID NO: 33934 - RNA, 21 nt, synthetic construct
  source 1..21: mol_type = other RNA; note = Description of Artificial Sequence: Synthetic oligonucleotide
tcccattacttttaattgatt

SEQ ID NO: 33935 - RNA, 21 nt, synthetic construct
  source 1..21: mol_type = other RNA; note = Description of Artificial Sequence: Synthetic oligonucleotide
tgcccattacttttaattgtt

SEQ ID NO: 33936 - RNA, 21 nt, synthetic construct
  source 1..21: mol_type = other RNA; note = Description of Artificial Sequence: Synthetic oligonucleotide
ttgcccattacttttaatttt

SEQ ID NO: 33937 - RNA, 21 nt, synthetic construct
  source 1..21: mol_type = other RNA; note = Description of Artificial Sequence: Synthetic oligonucleotide
tttgcccattacttttaattt

SEQ ID NO: 33938 - RNA, 21 nt, synthetic construct
  source 1..21: mol_type = other RNA; note = Description of Artificial Sequence: Synthetic oligonucleotide
tcttgcccattacttttaatt

SEQ ID NO: 33939 - RNA, 21 nt, synthetic construct
  source 1..21: mol_type = other RNA; note = Description of Artificial Sequence: Synthetic oligonucleotide
ttcttgcccattacttttatt

SEQ ID NO: 33940 - RNA, 21 nt, synthetic construct
  source 1..21: mol_type = other RNA; note = Description of Artificial Sequence: Synthetic oligonucleotide
tctcttgcccattactttttt

SEQ ID NO: 33941 - RNA, 21 nt, synthetic construct
  source 1..21: mol_type = other RNA; note = Description of Artificial Sequence: Synthetic oligonucleotide
ttctcttgcccattacttttt

SEQ ID NO: 33942 - RNA, 21 nt, synthetic construct
  source 1..21: mol_type = other RNA; note = Description of Artificial Sequence: Synthetic oligonucleotide
tatctcttgcccattactttt

SEQ ID NO: 33943 - RNA, 21 nt, synthetic construct
  source 1..21: mol_type = other RNA; note = Description of Artificial Sequence: Synthetic oligonucleotide
taatctcttgcccattacttt

SEQ ID NO: 33944 - RNA, 21 nt, synthetic construct
  source 1..21: mol_type = other RNA; note = Description of Artificial Sequence: Synthetic oligonucleotide
tcaatctcttgcccattactt

SEQ ID NO: 33945 - RNA, 21 nt, synthetic construct
  source 1..21: mol_type = other RNA; note = Description of Artificial Sequence: Synthetic oligonucleotide
tgcaatctcttgcccattatt

SEQ ID NO: 33946 - RNA, 21 nt, synthetic construct
  source 1..21: mol_type = other RNA; note = Description of Artificial Sequence: Synthetic oligonucleotide
ttgcaatctcttgcccatttt

SEQ ID NO: 33947 - RNA, 21 nt, synthetic construct
  source 1..21: mol_type = other RNA; note = Description of Artificial Sequence: Synthetic oligonucleotide
tatgcaatctcttgcccattt

SEQ ID NO: 33948 - RNA, 21 nt, synthetic construct
  source 1..21: mol_type = other RNA; note = Description of Artificial Sequence: Synthetic oligonucleotide
tgatgcaatctcttgcccatt

SEQ ID NO: 33949 - RNA, 21 nt, synthetic construct
  source 1..21: mol_type = other RNA; note = Description of Artificial Sequence: Synthetic oligonucleotide
ttgatgcaatctcttgccctt

SEQ ID NO: 33950 - RNA, 21 nt, synthetic construct
  source 1..21: mol_type = other RNA; note = Description of Artificial Sequence: Synthetic oligonucleotide
tatgatgcaatctcttgcctt

SEQ ID NO: 33951 - RNA, 21 nt, synthetic construct
  source 1..21: mol_type = other RNA; note = Description of Artificial Sequence: Synthetic oligonucleotide
ttatgatgcaatctcttgctt

SEQ ID NO: 33952 - RNA, 21 nt, synthetic construct
  source 1..21: mol_type = other RNA; note = Description of Artificial Sequence: Synthetic oligonucleotide
tgtatgatgcaatctcttgtt

SEQ ID NO: 33953 - RNA, 21 nt, synthetic construct
  source 1..21: mol_type = other RNA; note = Description of Artificial Sequence: Synthetic oligonucleotide
tagtatgatgcaatctctttt

SEQ ID NO: 33954 - RNA, 21 nt, synthetic construct
  source 1..21: mol_type = other RNA; note = Description of Artificial Sequence: Synthetic oligonucleotide
ttagtatgatgcaatctcttt

SEQ ID NO: 33955 - RNA, 21 nt, synthetic construct
  source 1..21: mol_type = other RNA; note = Description of Artificial Sequence: Synthetic oligonucleotide
tttagtatgatgcaatctctt

SEQ ID NO: 33956 - RNA, 21 nt, synthetic construct
  source 1..21: mol_type = other RNA; note = Description of Artificial Sequence: Synthetic oligonucleotide
tattagtatgatgcaatcttt

SEQ ID NO: 33957 - RNA, 21 nt, synthetic construct
  source 1..21: mol_type = other RNA; note = Description of Artificial Sequence: Synthetic oligonucleotide
taattagtatgatgcaatctt

SEQ ID NO: 33958 - RNA, 21 nt, synthetic construct
  source 1..21: mol_type = other RNA; note = Description of Artificial Sequence: Synthetic oligonucleotide
taaattagtatgatgcaattt

SEQ ID NO: 33959 - RNA, 21 nt, synthetic construct
  source 1..21: mol_type = other RNA; note = Description of Artificial Sequence: Synthetic oligonucleotide
ttaaattagtatgatgcaatt

SEQ ID NO: 33960 - RNA, 21 nt, synthetic construct
  source 1..21: mol_type = other RNA; note = Description of Artificial Sequence: Synthetic oligonucleotide
tctaaattagtatgatgcatt

SEQ ID NO: 33961 - RNA, 21 nt, synthetic construct
  source 1..21: mol_type = other RNA; note = Description of Artificial Sequence: Synthetic oligonucleotide
tactaaattagtatgatgctt

SEQ ID NO: 33962 - RNA, 21 nt, synthetic construct
  source 1..21: mol_type = other RNA; note = Description of Artificial Sequence: Synthetic oligonucleotide
ttactaaattagtatgatgtt

SEQ ID NO: 33963 - RNA, 21 nt, synthetic construct
  source 1..21: mol_type = other RNA; note = Description of Artificial Sequence: Synthetic oligonucleotide
tttactaaattagtatgattt

SEQ ID NO: 33964 - RNA, 21 nt, synthetic construct
  source 1..21: mol_type = other RNA; note = Description of Artificial Sequence: Synthetic oligonucleotide
tcttactaaattagtatgatt

SEQ ID NO: 33965 - RNA, 21 nt, synthetic construct
  source 1..21: mol_type = other RNA; note = Description of Artificial Sequence: Synthetic oligonucleotide
ttcttactaaattagtatgtt

SEQ ID NO: 33966 - RNA, 21 nt, synthetic construct
  source 1..21: mol_type = other RNA; note = Description of Artificial Sequence: Synthetic oligonucleotide
tttcttactaaattagtattt

SEQ ID NO: 33967 - RNA, 21 nt, synthetic construct
  source 1..21: mol_type = other RNA; note = Description of Artificial Sequence: Synthetic oligonucleotide
tgttcttactaaattagtatt

SEQ ID NO: 33968 - RNA, 21 nt, synthetic construct
  source 1..21: mol_type = other RNA; note = Description of Artificial Sequence: Synthetic oligonucleotide
tcgttcttactaaattagttt

SEQ ID NO: 33969 - RNA, 21 nt, synthetic construct
  source 1..21: mol_type = other RNA; note = Description of Artificial Sequence: Synthetic oligonucleotide
tacgttcttactaaattagtt

SEQ ID NO: 33970 - RNA, 21 nt, synthetic construct
  source 1..21: mol_type = other RNA; note = Description of Artificial Sequence: Synthetic oligonucleotide
taacgttcttactaaattatt

SEQ ID NO: 33971 - RNA, 21 nt, synthetic construct
  source 1..21: mol_type = other RNA; note = Description of Artificial Sequence: Synthetic oligonucleotide
tgaacgttcttactaaatttt

SEQ ID NO: 33972 - RNA, 21 nt, synthetic construct
  source 1..21: mol_type = other RNA; note = Description of Artificial Sequence: Synthetic oligonucleotide
tggaacgttcttactaaattt

SEQ ID NO: 33973 - RNA, 21 nt, synthetic construct
  source 1..21: mol_type = other RNA; note = Description of Artificial Sequence: Synthetic oligonucleotide
tgggaacgttcttactaaatt

SEQ ID NO: 33974 - RNA, 21 nt, synthetic construct
  source 1..21: mol_type = other RNA; note = Description of Artificial Sequence: Synthetic oligonucleotide
ttgggaacgttcttactaatt

SEQ ID NO: 33975 - RNA, 21 nt, synthetic construct
  source 1..21: mol_type = other RNA; note = Description of Artificial Sequence: Synthetic oligonucleotide
tttgggaacgttcttactatt

SEQ ID NO: 33976 - RNA, 21 nt, synthetic construct
  source 1..21: mol_type = other RNA; note = Description of Artificial Sequence: Synthetic oligonucleotide
ttttgggaacgttcttacttt

SEQ ID NO: 33977 - RNA, 21 nt, synthetic construct
  source 1..21: mol_type = other RNA; note = Description of Artificial Sequence: Synthetic oligonucleotide
tatttgggaacgttcttactt

SEQ ID NO: 33978 - RNA, 21 nt, synthetic construct
  source 1..21: mol_type = other RNA; note = Description of Artificial Sequence: Synthetic oligonucleotide
tcatttgggaacgttcttatt

SEQ ID NO: 33979 - RNA, 21 nt, synthetic construct
  source 1..21: mol_type = other RNA; note = Description of Artificial Sequence: Synthetic oligonucleotide
tacatttgggaacgttctttt

SEQ ID NO: 33980 - RNA, 21 nt, synthetic construct
  source 1..21: mol_type = other RNA; note = Description of Artificial Sequence: Synthetic oligonucleotide
taacatttgggaacgttcttt

SEQ ID NO: 33981 - RNA, 21 nt, synthetic construct
  source 1..21: mol_type = other RNA; note = Description of Artificial Sequence: Synthetic oligonucleotide
tcaacatttgggaacgttctt

SEQ ID NO: 33982 - RNA, 21 nt, synthetic construct
  source 1..21: mol_type = other RNA; note = Description of Artificial Sequence: Synthetic oligonucleotide
tacaacatttgggaacgtttt

SEQ ID NO: 33983 - RNA, 21 nt, synthetic construct
  source 1..21: mol_type = other RNA; note = Description of Artificial Sequence: Synthetic oligonucleotide
ttacaacatttgggaacgttt

SEQ ID NO: 33984 - RNA, 21 nt, synthetic construct
  source 1..21: mol_type = other RNA; note = Description of Artificial Sequence: Synthetic oligonucleotide
tttacaacatttgggaacgtt

SEQ ID NO: 33985 - RNA, 21 nt, synthetic construct
  source 1..21: mol_type = other RNA; note = Description of Artificial Sequence: Synthetic oligonucleotide
tgttacaacatttgggaactt

SEQ ID NO: 33986 - RNA, 21 nt, synthetic construct
  source 1..21: mol_type = other RNA; note = Description of Artificial Sequence: Synthetic oligonucleotide
ttgttacaacatttgggaatt

SEQ ID NO: 33987 - RNA, 21 nt, synthetic construct
  source 1..21: mol_type = other RNA; note = Description of Artificial Sequence: Synthetic oligonucleotide
tttgttacaacatttgggatt

SEQ ID NO: 33988 - RNA, 21 nt, synthetic construct
  source 1..21: mol_type = other RNA; note = Description of Artificial Sequence: Synthetic oligonucleotide
tattgttacaacatttgggtt

SEQ ID NO: 33989 - RNA, 21 nt, synthetic construct
  source 1..21: mol_type = other RNA; note = Description of Artificial Sequence: Synthetic oligonucleotide
tcattgttacaacatttggtt

SEQ ID NO: 33990 - RNA, 21 nt, synthetic construct
  source 1..21: mol_type = other RNA; note = Description of Artificial Sequence: Synthetic oligonucleotide
tacattgttacaacatttgtt

SEQ ID NO: 33991 - RNA, 21 nt, synthetic construct
  source 1..21: mol_type = other RNA; note = Description of Artificial Sequence: Synthetic oligonucleotide
tcacattgttacaacattttt

SEQ ID NO: 33992 - RNA, 21 nt, synthetic construct
  source 1..21: mol_type = other RNA; note = Description of Artificial Sequence: Synthetic oligonucleotide
tccacattgttacaacatttt

SEQ ID NO: 33993 - RNA, 21 nt, synthetic construct
  source 1..21: mol_type = other RNA; note = Description of Artificial Sequence: Synthetic oligonucleotide
ttccacattgttacaacattt

SEQ ID NO: 33994 - RNA, 21 nt, synthetic construct
  source 1..21: mol_type = other RNA; note = Description of Artificial Sequence: Synthetic oligonucleotide
tatccacattgttacaacatt

SEQ ID NO: 33995 - RNA, 21 nt, synthetic construct
  source 1..21: mol_type = other RNA; note = Description of Artificial Sequence: Synthetic oligonucleotide
tgatccacattgttacaactt

SEQ ID NO: 33996 - RNA, 21 nt, synthetic construct
  source 1..21: mol_type = other RNA; note = Description of Artificial Sequence: Synthetic oligonucleotide
ttgatccacattgttacaatt

SEQ ID NO: 33997 - RNA, 21 nt, synthetic construct
  source 1..21: mol_type = other RNA; note = Description of Artificial Sequence: Synthetic oligonucleotide
tatgatccacattgttacatt

SEQ ID NO: 33998 - RNA, 21 nt, synthetic construct
  source 1..21: mol_type = other RNA; note = Description of Artificial Sequence: Synthetic oligonucleotide
ttatgatccacattgttactt

SEQ ID NO: 33999 - RNA, 21 nt, synthetic construct
  source 1..21: mol_type = other RNA; note = Description of Artificial Sequence: Synthetic oligonucleotide
tgtatgatccacattgttatt

SEQ ID NO: 34000 - RNA, 21 nt, synthetic construct
  source 1..21: mol_type = other RNA; note = Description of Artificial Sequence: Synthetic oligonucleotide
ttgtatgatccacattgtttt

SEQ ID NO: 34001 - RNA, 21 nt, synthetic construct
  source 1..21: mol_type = other RNA; note = Description of Artificial Sequence: Synthetic oligonucleotide
tatgtatgatccacattgttt

SEQ ID NO: 34002 - RNA, 21 nt, synthetic construct
  source 1..21: mol_type = other RNA; note = Description of Artificial Sequence: Synthetic oligonucleotide
tgatgtatgatccacattgtt

SEQ ID NO: 34003 - RNA, 21 nt, synthetic construct
  source 1..21: mol_type = other RNA; note = Description of Artificial Sequence: Synthetic oligonucleotide
tagatgtatgatccacatttt

SEQ ID NO: 34004 - RNA, 21 nt, synthetic construct
  source 1..21: mol_type = other RNA; note = Description of Artificial Sequence: Synthetic oligonucleotide
tgagatgtatgatccacattt

SEQ ID NO: 34005 - RNA, 21 nt, synthetic construct
  source 1..21: mol_type = other RNA; note = Description of Artificial Sequence: Synthetic oligonucleotide
tagagatgtatgatccacatt

SEQ ID NO: 34006 - RNA, 21 nt, synthetic construct
  source 1..21: mol_type = other RNA; note = Description of Artificial Sequence: Synthetic oligonucleotide
tcagagatgtatgatccactt

SEQ ID NO: 34007 - RNA, 21 nt, synthetic construct
  source 1..21: mol_type = other RNA; note = Description of Artificial Sequence: Synthetic oligonucleotide
tccagagatgtatgatccatt

SEQ ID NO: 34008 - RNA, 21 nt, synthetic construct
  source 1..21: mol_type = other RNA; note = Description of Artificial Sequence: Synthetic oligonucleotide
taccagagatgtatgatcctt

SEQ ID NO: 34009 - RNA, 21 nt, synthetic construct
  source 1..21: mol_type = other RNA; note = Description of Artificial Sequence: Synthetic oligonucleotide
taaccagagatgtatgatctt

SEQ ID NO: 34010 - RNA, 21 nt, synthetic construct
  source 1..21: mol_type = other RNA; note = Description of Artificial Sequence: Synthetic oligonucleotide
taaaccagagatgtatgattt

SEQ ID NO: 34011 - RNA, 21 nt, synthetic construct
  source 1..21: mol_type = other RNA; note = Description of Artificial Sequence: Synthetic oligonucleotide
taaaaccagagatgtatgatt

SEQ ID NO: 34012 - RNA, 21 nt, synthetic construct
  source 1..21: mol_type = other RNA; note = Description of Artificial Sequence: Synthetic oligonucleotide
taaaaaccagagatgtatgtt

SEQ ID NO: 34013 - RNA, 21 nt, synthetic construct
  source 1..21: mol_type = other RNA; note = Description of Artificial Sequence: Synthetic oligonucleotide
taaaaaaccagagatgtattt

SEQ ID NO: 34014 - RNA, 21 nt, synthetic construct
  source 1..21: mol_type = other RNA; note = Description of Artificial Sequence: Synthetic oligonucleotide
ttaaaaaaccagagatgtatt

SEQ ID NO: 34015 - RNA, 21 nt, synthetic construct
  source 1..21: mol_type = other RNA; note = Description of Artificial Sequence: Synthetic oligonucleotide
tttaaaaaaccagagatgttt

SEQ ID NO: 34016 - RNA, 21 nt, synthetic construct
  source 1..21: mol_type = other RNA; note = Description of Artificial Sequence: Synthetic oligonucleotide
ttttaaaaaaccagagatgtt

SEQ ID NO: 34017 - RNA, 21 nt, synthetic construct
  source 1..21: mol_type = other RNA; note = Description of Artificial Sequence: Synthetic oligonucleotide
tatttaaaaaaccagagattt

SEQ ID NO: 34018 - RNA, 21 nt, synthetic construct
  source 1..21: mol_type = other RNA; note = Description of Artificial Sequence: Synthetic oligonucleotide
tcatttaaaaaaccagagatt

SEQ ID NO: 34019 - RNA, 21 nt, synthetic construct
  source 1..21: mol_type = other RNA; note = Description of Artificial Sequence: Synthetic oligonucleotide
tacatttaaaaaaccagagtt

SEQ ID NO: 34020 - RNA, 21 nt, synthetic construct
  source 1..21: mol_type = other RNA; note = Description of Artificial Sequence: Synthetic oligonucleotide
ttacatttaaaaaaccagatt

SEQ ID NO: 34021 - RNA, 21 nt, synthetic construct
  source 1..21: mol_type = other RNA; note = Description of Artificial Sequence: Synthetic oligonucleotide
tatacatttaaaaaaccagtt

SEQ ID NO: 34022 - RNA, 21 nt, synthetic construct
  source 1..21: mol_type = other RNA; note = Description of Artificial Sequence: Synthetic oligonucleotide
taatacatttaaaaaaccatt

SEQ ID NO: 34023 - RNA, 21 nt, synthetic construct
  source 1..21: mol_type = other RNA; note = Description of Artificial Sequence: Synthetic oligonucleotide
tcaatacatttaaaaaacctt

SEQ ID NO: 34024 - RNA, 21 nt, synthetic construct
  source 1..21: mol_type = other RNA; note = Description of Artificial Sequence: Synthetic oligonucleotide
ttcaatacatttaaaaaactt

SEQ ID NO: 34025 - RNA, 21 nt, synthetic construct
  source 1..21: mol_type = other RNA; note = Description of Artificial Sequence: Synthetic oligonucleotide
tctcaatacatttaaaaaatt

SEQ ID NO: 34026 - RNA, 21 nt, synthetic construct
  source 1..21: mol_type = other RNA; note = Description of Artificial Sequence: Synthetic oligonucleotide
tcctcaatacatttaaaaatt

SEQ ID NO: 34027 - RNA, 21 nt, synthetic construct
  source 1..21: mol_type = other RNA; note = Description of Artificial Sequence: Synthetic oligonucleotide
tgcctcaatacatttaaaatt

SEQ ID NO: 34028 - RNA, 21 nt, synthetic construct
  source 1..21: mol_type = other RNA; note = Description of Artificial Sequence: Synthetic oligonucleotide
tagcctcaatacatttaaatt

SEQ ID NO: 34029 - RNA, 21 nt, synthetic construct
  source 1..21: mol_type = other RNA; note = Description of Artificial Sequence: Synthetic oligonucleotide
taagcctcaatacatttaatt

SEQ ID NO: 34030 - RNA, 21 nt, synthetic construct
  source 1..21: mol_type = other RNA; note = Description of Artificial Sequence: Synthetic oligonucleotide
taaagcctcaatacatttatt

SEQ ID NO: 34031 - RNA, 21 nt, synthetic construct
  source 1..21: mol_type = other RNA; note = Description of Artificial Sequence: Synthetic oligonucleotide
tgaaagcctcaatacattttt

SEQ ID NO: 34032 - RNA, 21 nt, synthetic construct
  source 1..21: mol_type = other RNA; note = Description of Artificial Sequence: Synthetic oligonucleotide
tagaaagcctcaatacatttt

SEQ ID NO: 34033 - RNA, 21 nt, synthetic construct
  source 1..21: mol_type = other RNA; note = Description of Artificial Sequence: Synthetic oligonucleotide
taagaaagcctcaatacattt

SEQ ID NO: 34034 - RNA, 21 nt, synthetic construct
  source 1..21: mol_type = other RNA; note = Description of Artificial Sequence: Synthetic oligonucleotide
tcaagaaagcctcaatacatt

SEQ ID NO: 34035 - RNA, 21 nt, synthetic construct
  source 1..21: mol_type = other RNA; note = Description of Artificial Sequence: Synthetic oligonucleotide
tccaagaaagcctcaatactt

SEQ ID NO: 34036 - RNA, 21 nt, synthetic construct
  source 1..21: mol_type = other RNA; note = Description of Artificial Sequence: Synthetic oligonucleotide
taccaagaaagcctcaatatt

SEQ ID NO: 34037 - RNA, 21 nt, synthetic construct
  source 1..21: mol_type = other RNA; note = Description of Artificial Sequence: Synthetic oligonucleotide
tcaccaagaaagcctcaattt

SEQ ID NO: 34038 - RNA, 21 nt, synthetic construct
  source 1..21: mol_type = other RNA; note = Description of Artificial Sequence: Synthetic oligonucleotide
tccaccaagaaagcctcaatt

SEQ ID NO: 34039 - RNA, 21 nt, synthetic construct
  source 1..21: mol_type = other RNA; note = Description of Artificial Sequence: Synthetic oligonucleotide
ttccaccaagaaagcctcatt

SEQ ID NO: 34040 - RNA, 21 nt, synthetic construct
  source 1..21: mol_type = other RNA; note = Description of Artificial Sequence: Synthetic oligonucleotide
tgtccaccaagaaagcctctt

SEQ ID NO: 34041 - RNA, 21 nt, synthetic construct
  source 1..21: mol_type = other RNA; note = Description of Artificial Sequence: Synthetic oligonucleotide
tagtccaccaagaaagccttt

SEQ ID NO: 34042 - RNA, 21 nt, synthetic construct
  source 1..21: mol_type = other RNA; note = Description of Artificial Sequence: Synthetic oligonucleotide
ttagtccaccaagaaagcctt

SEQ ID NO: 34043 - RNA, 21 nt, synthetic construct
  source 1..21: mol_type = other RNA; note = Description of Artificial Sequence: Synthetic oligonucleotide
tctagtccaccaagaaagctt

SEQ ID NO: 34044 - RNA, 21 nt, synthetic construct
  source 1..21: mol_type = other RNA; note = Description of Artificial Sequence: Synthetic oligonucleotide
tactagtccaccaagaaagtt

SEQ ID NO: 34045 - RNA, 21 nt, synthetic construct
  source 1..21: mol_type = other RNA; note = Description of Artificial Sequence: Synthetic oligonucleotide
ttactagtccaccaagaaatt

SEQ ID NO: 34046 - RNA, 21 nt, synthetic construct
  source 1..21: mol_type = other RNA; note = Description of Artificial Sequence: Synthetic oligonucleotide
tatactagtccaccaagaatt

SEQ ID NO: 34047 - RNA, 21 nt, synthetic construct
  source 1..21: mol_type = other RNA; note = Description of Artificial Sequence: Synthetic oligonucleotide
ttatactagtccaccaagatt

SEQ ID NO: 34048 - RNA, 21 nt, synthetic construct
  source 1..21: mol_type = other RNA; note = Description of Artificial Sequence: Synthetic oligonucleotide
tctatactagtccaccaagtt

SEQ ID NO: 34049 - RNA, 21 nt, synthetic construct
  source 1..21: mol_type = other RNA; note = Description of Artificial Sequence: Synthetic oligonucleotide
tactatactagtccaccaatt

SEQ ID NO: 34050 - RNA, 21 nt, synthetic construct
  source 1..21: mol_type = other RNA; note = Description of Artificial Sequence: Synthetic oligonucleotide
ttactatactagtccaccatt

SEQ ID NO: 34051 - RNA, 21 nt, synthetic construct
  source 1..21: mol_type = other RNA; note = Description of Artificial Sequence: Synthetic oligonucleotide
tatactatactagtccacctt

SEQ ID NO: 34052 - RNA, 21 nt, synthetic construct
  source 1..21: mol_type = other RNA; note = Description of Artificial Sequence: Synthetic oligonucleotide
ttatactatactagtccactt

SEQ ID NO: 34053 - RNA, 21 nt, synthetic construct
  source 1..21: mol_type = other RNA; note = Description of Artificial Sequence: Synthetic oligonucleotide
tgtatactatactagtccatt

SEQ ID NO: 34054 - RNA, 21 nt, synthetic construct
  source 1..21: mol_type = other RNA; note = Description of Artificial Sequence: Synthetic oligonucleotide
tcgtatactatactagtcctt

SEQ ID NO: 34055 - RNA, 21 nt, synthetic construct
  source 1..21: mol_type = other RNA; note = Description of Artificial Sequence: Synthetic oligonucleotide
tccgtatactatactagtctt

SEQ ID NO: 34056 - RNA, 21 nt, synthetic construct
  source 1..21: mol_type = other RNA; note = Description of Artificial Sequence: Synthetic oligonucleotide
taccgtatactatactagttt

SEQ ID NO: 34057 - RNA, 21 nt, synthetic construct
  source 1..21: mol_type = other RNA; note = Description of Artificial Sequence: Synthetic oligonucleotide
tgaccgtatactatactagtt

SEQ ID NO: 34058 - RNA, 21 nt, synthetic construct
  source 1..21: mol_type = other RNA; note = Description of Artificial Sequence: Synthetic oligonucleotide
ttgaccgtatactatactatt

SEQ ID NO: 34059 - RNA, 21 nt, synthetic construct
  source 1..21: mol_type = other RNA; note = Description of Artificial Sequence: Synthetic oligonucleotide
tctgaccgtatactatacttt

SEQ ID NO: 34060 - RNA, 21 nt, synthetic construct
  source 1..21: mol_type = other RNA; note = Description of Artificial Sequence: Synthetic oligonucleotide
tactgaccgtatactatactt

SEQ ID NO: 34061 - RNA, 21 nt, synthetic construct
  source 1..21: mol_type = other RNA; note = Description of Artificial Sequence: Synthetic oligonucleotide
taactgaccgtatactatatt

SEQ ID NO: 34062 - RNA, 21 nt, synthetic construct
  source 1..21: mol_type = other RNA; note = Description of Artificial Sequence: Synthetic oligonucleotide
ttaactgaccgtatactattt

SEQ ID NO: 34063 - RNA, 21 nt, synthetic construct
  source 1..21: mol_type = other RNA; note = Description of Artificial Sequence: Synthetic oligonucleotide
tataactgaccgtatactatt

SEQ ID NO: 34064 - RNA, 21 nt, synthetic construct
  source 1..21: mol_type = other RNA; note = Description of Artificial Sequence: Synthetic oligonucleotide
tcataactgaccgtatacttt

SEQ ID NO: 34065 - RNA, 21 nt, synthetic construct
  source 1..21: mol_type = other RNA; note = Description of Artificial Sequence: Synthetic oligonucleotide
tacataactgaccgtatactt

SEQ ID NO: 34066 - RNA, 21 nt, synthetic construct
  source 1..21: mol_type = other RNA; note = Description of Artificial Sequence: Synthetic oligonucleotide
tgacataactgaccgtatatt

SEQ ID NO: 34067 - RNA, 21 nt, synthetic construct
  source 1..21: mol_type = other RNA; note = Description of Artificial Sequence: Synthetic oligonucleotide
ttgacataactgaccgtattt

SEQ ID NO: 34068 - RNA, 21 nt, synthetic construct
  source 1..21: mol_type = other RNA; note = Description of Artificial Sequence: Synthetic oligonucleotide
tttgacataactgaccgtatt

SEQ ID NO: 34069 - RNA, 21 nt, synthetic construct
  source 1..21: mol_type = other RNA; note = Description of Artificial Sequence: Synthetic oligonucleotide
tattgacataactgaccgttt

SEQ ID NO: 34070 - RNA, 21 nt, synthetic construct
  source 1..21: mol_type = other RNA; note = Description of Artificial Sequence: Synthetic oligonucleotide
tcattgacataactgaccgtt

SEQ ID NO: 34071 - RNA, 21 nt, synthetic construct
  source 1..21: mol_type = other RNA; note = Description of Artificial Sequence: Synthetic oligonucleotide
tacattgacataactgacctt

SEQ ID NO: 34072 - RNA, 21 nt, synthetic construct
  source 1..21: mol_type = other RNA; note = Description of Artificial Sequence: Synthetic oligonucleotide
taacattgacataactgactt

SEQ ID NO: 34073 - RNA, 21 nt, synthetic construct
  source 1..21: mol_type = other RNA; note = Description of Artificial Sequence: Synthetic oligonucleotide
taaacattgacataactgatt

SEQ ID NO: 34074 - RNA, 21 nt, synthetic construct
  source 1..21: mol_type = other RNA; note = Description of Artificial Sequence: Synthetic oligonucleotide
tgaaacattgacataactgtt

SEQ ID NO: 34075 - RNA, 21 nt, synthetic construct
  source 1..21: mol_type = other RNA; note = Description of Artificial Sequence: Synthetic oligonucleotide
ttgaaacattgacataacttt

SEQ ID NO: 34076 - RNA, 21 nt, synthetic construct
  source 1..21: mol_type = other RNA; note = Description of Artificial Sequence: Synthetic oligonucleotide
tatgaaacattgacataactt

SEQ ID NO: 34077 - RNA, 21 nt, synthetic construct
  source 1..21: mol_type = other RNA; note = Description of Artificial Sequence: Synthetic oligonucleotide
tcatgaaacattgacataatt

SEQ ID NO: 34078 - RNA, 21 nt, synthetic construct
  source 1..21: mol_type = other RNA; note = Description of Artificial Sequence: Synthetic oligonucleotide
tccatgaaacattgacatatt

SEQ ID NO: 34079 - RNA, 21 nt, synthetic construct
  source 1..21: mol_type = other RNA; note = Description of Artificial Sequence: Synthetic oligonucleotide
taccatgaaacattgacattt

SEQ ID NO: 34080 - RNA, 21 nt, synthetic construct
  source 1..21: mol_type = other RNA; note = Description of Artificial Sequence: Synthetic oligonucleotide
tgaccatgaaacattgacatt

SEQ ID NO: 34081 - RNA, 21 nt, synthetic construct
  source 1..21: mol_type = other RNA; note = Description of Artificial Sequence: Synthetic oligonucleotide
ttgaccatgaaacattgactt

SEQ ID NO: 34082 - RNA, 21 nt, synthetic construct
  source 1..21: mol_type = other RNA; note = Description of Artificial Sequence: Synthetic oligonucleotide
tttgaccatgaaacattgatt

SEQ ID NO: 34083 - RNA, 21 nt, synthetic construct
  source 1..21: mol_type = other RNA; note = Description of Artificial Sequence: Synthetic oligonucleotide
tattgaccatgaaacattgtt

SEQ ID NO: 34084 - RNA, 21 nt, synthetic construct
  source 1..21: mol_type = other RNA; note = Description of Artificial Sequence: Synthetic oligonucleotide
ttattgaccatgaaacatttt

SEQ ID NO: 34085 - RNA, 21 nt, synthetic construct
  source 1..21: mol_type = other RNA; note = Description of Artificial Sequence: Synthetic oligonucleotide
tttattgaccatgaaacattt

SEQ ID NO: 34086 - RNA, 21 nt, synthetic construct
  source 1..21: mol_type = other RNA; note = Description of Artificial Sequence: Synthetic oligonucleotide
ttttattgaccatgaaacatt

SEQ ID NO: 34087 - RNA, 21 nt, synthetic construct
  source 1..21: mol_type = other RNA; note = Description of Artificial Sequence: Synthetic oligonucleotide
tttttattgaccatgaaactt

SEQ ID NO: 34088 - RNA, 21 nt, synthetic construct
  source 1..21: mol_type = other RNA; note = Description of Artificial Sequence: Synthetic oligonucleotide
ttttttattgaccatgaaatt

SEQ ID NO: 34089 - RNA, 21 nt, synthetic construct
  source 1..21: mol_type = other RNA; note = Description of Artificial Sequence: Synthetic oligonucleotide
tctttttattgaccatgaatt

SEQ ID NO: 34090 - RNA, 21 nt, synthetic construct
  source 1..21: mol_type = other RNA; note = Description of Artificial Sequence: Synthetic oligonucleotide
tcctttttattgaccatgatt

SEQ ID NO: 34091 - RNA, 21 nt, synthetic construct
  source 1..21: mol_type = other RNA; note = Description of Artificial Sequence: Synthetic oligonucleotide
ttcctttttattgaccatgtt

SEQ ID NO: 34092 - RNA, 21 nt, synthetic construct
  source 1..21: mol_type = other RNA; note = Description of Artificial Sequence: Synthetic oligonucleotide
tttcctttttattgaccattt

SEQ ID NO: 34093 - RNA, 21 nt, synthetic construct
  source 1..21: mol_type = other RNA; note = Description of Artificial Sequence: Synthetic oligonucleotide
tcttcctttttattgaccatt

SEQ ID NO: 34094 - RNA, 21 nt, synthetic construct
  source 1..21: mol_type = other RNA; note = Description of Artificial Sequence: Synthetic oligonucleotide
tacttcctttttattgacctt

SEQ ID NO: 34095 - RNA, 21 nt, synthetic construct
  source 1..21: mol_type = other RNA; note = Description of Artificial Sequence: Synthetic oligonucleotide
taacttcctttttattgactt

SEQ ID NO: 34096 - RNA, 21 nt, synthetic construct
  source 1..21: mol_type = other RNA; note = Description of Artificial Sequence: Synthetic oligonucleotide
tcaacttcctttttattgatt

SEQ ID NO: 34097 - RNA, 21 nt, synthetic construct
  source 1..21: mol_type = other RNA; note = Description of Artificial Sequence: Synthetic oligonucleotide
tgcaacttcctttttattgtt

SEQ ID NO: 34098 - RNA, 21 nt, synthetic construct
  source 1..21: mol_type = other RNA; note = Description of Artificial Sequence: Synthetic oligonucleotide
ttgcaacttcctttttatttt

SEQ ID NO: 34099 - RNA, 21 nt, synthetic construct
  source 1..21: mol_type = other RNA; note = Description of Artificial Sequence: Synthetic oligonucleotide
tttgcaacttcctttttattt

SEQ ID NO: 34100 - RNA, 21 nt, synthetic construct
  source 1..21: mol_type = other RNA; note = Description of Artificial Sequence: Synthetic oligonucleotide
ttttgcaacttcctttttatt

SEQ ID NO: 34101 - RNA, 21 nt, synthetic construct
  source 1..21: mol_type = other RNA; note = Description of Artificial Sequence: Synthetic oligonucleotide
tatttgcaacttccttttttt

SEQ ID NO: 34102 - RNA, 21 nt, synthetic construct
  source 1..21: mol_type = other RNA; note = Description of Artificial Sequence: Synthetic oligonucleotide
taatttgcaacttcctttttt

SEQ ID NO: 34103 - RNA, 21 nt, synthetic construct
  source 1..21: mol_type = other RNA; note = Description of Artificial Sequence: Synthetic oligonucleotide
tcaatttgcaacttccttttt

SEQ ID NO: 34104 - RNA, 21 nt, synthetic construct
  source 1..21: mol_type = other RNA; note = Description of Artificial Sequence: Synthetic oligonucleotide
tacaatttgcaacttcctttt

SEQ ID NO: 34105 - RNA, 21 nt, synthetic construct
  source 1..21: mol_type = other RNA; note = Description of Artificial Sequence: Synthetic oligonucleotide
tcacaatttgcaacttccttt

SEQ ID NO: 34106 - RNA, 21 nt, synthetic construct
  source 1..21: mol_type = other RNA; note = Description of Artificial Sequence: Synthetic oligonucleotide
tcaggggcgtggcgagggttt

SEQ ID NO: 34107 - RNA, 21 nt, synthetic construct
  source 1..21: mol_type = other RNA; note = Description of Artificial Sequence: Synthetic oligonucleotide
tgcaggggcgtggcgagggtt

SEQ ID NO: 34108 - RNA, 21 nt, synthetic construct
  source 1..21: mol_type = other RNA; note = Description of Artificial Sequence: Synthetic oligonucleotide
tagcaggggcgtggcgaggtt

SEQ ID NO: 34109 - RNA, 21 nt, synthetic construct
  source 1..21: mol_type = other RNA; note = Description of Artificial Sequence: Synthetic oligonucleotide
tgagcaggggcgtggcgagtt

SEQ ID NO: 34110 - RNA, 21 nt, synthetic construct
  source 1..21: mol_type = other RNA; note = Description of Artificial Sequence: Synthetic oligonucleotide
tggagcaggggcgtggcgatt

SEQ ID NO: 34111 - RNA, 21 nt, synthetic construct
  source 1..21: mol_type = other RNA; note = Description of Artificial Sequence: Synthetic oligonucleotide
tgggagcaggggcgtggcgtt

SEQ ID NO: 34112 - RNA, 21 nt, synthetic construct
  source 1..21: mol_type = other RNA; note = Description of Artificial Sequence: Synthetic oligonucleotide
tggggagcaggggcgtggctt

SEQ ID NO: 34113 - RNA, 21 nt, synthetic construct
  source 1..21: mol_type = other RNA; note = Description of Artificial Sequence: Synthetic oligonucleotide
tgggggagcaggggcgtggtt

SEQ ID NO: 34114 - RNA, 21 nt, synthetic construct
  source 1..21: mol_type = other RNA; note = Description of Artificial Sequence: Synthetic oligonucleotide
tcgggggagcaggggcgtgtt

SEQ ID NO: 34115 - RNA, 21 nt, synthetic construct
  source 1..21: mol_type = other RNA; note = Description of Artificial Sequence: Synthetic oligonucleotide
tgcgggggagcaggggcgttt

SEQ ID NO: 34116 - RNA, 21 nt, synthetic construct
  source 1..21: mol_type = other RNA; note = Description of Artificial Sequence: Synthetic oligonucleotide
tcgcgggggagcaggggcgtt

SEQ ID NO: 34117 - RNA, 21 nt, synthetic construct
  source 1..21: mol_type = other RNA; note = Description of Artificial Sequence: Synthetic oligonucleotide
tccgcgggggagcaggggctt

SEQ ID NO: 34118 - RNA, 21 nt, synthetic construct
  source 1..21: mol_type = other RNA; note = Description of Artificial Sequence: Synthetic oligonucleotide
taccgcgggggagcaggggtt

SEQ ID NO: 34119 - RNA, 21 nt, synthetic construct
  source 1..21: mol_type = other RNA; note = Description of Artificial Sequence: Synthetic oligonucleotide
taaccgcgggggagcagggtt

SEQ ID NO: 34120 - RNA, 21 nt, synthetic construct
  source 1..21: mol_type = other RNA; note = Description of Artificial Sequence: Synthetic oligonucleotide
tcaaccgcgggggagcaggtt

SEQ ID NO: 34121 - RNA, 21 nt, synthetic construct
  source 1..21: mol_type = other RNA; note = Description of Artificial Sequence: Synthetic oligonucleotide
tccaaccgcgggggagcagtt

SEQ ID NO: 34122 - RNA, 21 nt, synthetic construct
  source 1..21: mol_type = other RNA; note = Description of Artificial Sequence: Synthetic oligonucleotide
taccaaccgcgggggagcatt

SEQ ID NO: 34123 - RNA, 21 nt, synthetic construct
  source 1..21: mol_type = other RNA; note = Description of Artificial Sequence: Synthetic oligonucleotide
taaccaaccgcgggggagctt

SEQ ID NO: 34124 - RNA, 21 nt, synthetic construct
  source 1..21: mol_type = other RNA; note = Description of Artificial Sequence: Synthetic oligonucleotide
tgaaccaaccgcgggggagtt

SEQ ID NO: 34125 - RNA, 21 nt, synthetic construct
  source 1..21: mol_type = other RNA; note = Description of Artificial Sequence: Synthetic oligonucleotide
tagaaccaaccgcgggggatt

SEQ ID NO: 34126 - RNA, 21 nt, synthetic construct
  source 1..21: mol_type = other RNA; note = Description of Artificial Sequence: Synthetic oligonucleotide
taagaaccaaccgcgggggtt

SEQ ID NO: 34127 - RNA, 21 nt, synthetic construct
  source 1..21: mol_type = other RNA; note = Description of Artificial Sequence: Synthetic oligonucleotide
tgaagaaccaaccgcggggtt

SEQ ID NO: 34128 - RNA, 21 nt, synthetic construct
  source 1..21: mol_type = other RNA; note = Description of Artificial Sequence: Synthetic oligonucleotide
tggaagaaccaaccgcgggtt

SEQ ID NO: 34129 - RNA, 21 nt, synthetic construct
  source 1..21: mol_type = other RNA; note = Description of Artificial Sequence: Synthetic oligonucleotide
taggaagaaccaaccgcggtt

SEQ ID NO: 34130 - RNA, 21 nt, synthetic construct
  source 1..21: mol_type = other RNA; note = Description of Artificial Sequence: Synthetic oligonucleotide
taaggaagaaccaaccgcgtt

SEQ ID NO: 34131 - RNA, 21 nt, synthetic construct
  source 1..21: mol_type = other RNA; note = Description of Artificial Sequence: Synthetic oligonucleotide
tcaaggaagaaccaaccgctt

SEQ ID NO: 34132 - RNA, 21 nt, synthetic construct
  source 1..21: mol_type = other RNA; note = Description of Artificial Sequence: Synthetic oligonucleotide
tgcaaggaagaaccaaccgtt

SEQ ID NO: 34133 - RNA, 21 nt, synthetic construct
  source 1..21: mol_type = other RNA; note = Description of Artificial Sequence: Synthetic oligonucleotide
tagcaaggaagaaccaacctt

SEQ ID NO: 34134 - RNA, 21 nt, synthetic construct
  source 1..21: mol_type = other RNA; note = Description of Artificial Sequence: Synthetic oligonucleotide
tgagcaaggaagaaccaactt

SEQ ID NO: 34135 - RNA, 21 nt, synthetic construct
  source 1..21: mol_type = other RNA; note = Description of Artificial Sequence: Synthetic oligonucleotide
tagagcaaggaagaaccaatt

SEQ ID NO: 34136 - RNA, 21 nt, synthetic construct
  source 1..21: mol_type = other RNA; note = Description of Artificial Sequence: Synthetic oligonucleotide
ttagagcaaggaagaaccatt

SEQ ID NO: 34137 - RNA, 21 nt, synthetic construct
  source 1..21: mol_type = other RNA; note = Description of Artificial Sequence: Synthetic oligonucleotide
tgtagagcaaggaagaacctt

SEQ ID NO: 34138 - RNA, 21 nt, synthetic construct
  source 1..21: mol_type = other RNA; note = Description of Artificial Sequence: Synthetic oligonucleotide
tagtagagcaaggaagaactt

SEQ ID NO: 34139 - RNA, 21 nt, synthetic construct
  source 1..21: mol_type = other RNA; note = Description of Artificial Sequence: Synthetic oligonucleotide
tgagtagagcaaggaagaatt

SEQ ID NO: 34140 - RNA, 21 nt, synthetic construct
  source 1..21: mol_type = other RNA; note = Description of Artificial Sequence: Synthetic oligonucleotide
ttgagtagagcaaggaagatt

SEQ ID NO: 34141 - RNA, 21 nt, synthetic construct
  source 1..21: mol_type = other RNA; note = Description of Artificial Sequence: Synthetic oligonucleotide
tttgagtagagcaaggaagtt

SEQ ID NO: 34142 - RNA, 21 nt, synthetic construct
  source 1..21: mol_type = other RNA; note = Description of Artificial Sequence: Synthetic oligonucleotide
tgttgagtagagcaaggaatt

SEQ ID NO: 34143 - RNA, 21 nt, synthetic construct
  source 1..21: mol_type = other RNA; note = Description of Artificial Sequence: Synthetic oligonucleotide
tggttgagtagagcaaggatt

SEQ ID NO: 34144 - RNA, 21 nt, synthetic construct
  source 1..21: mol_type = other RNA; note = Description of Artificial Sequence: Synthetic oligonucleotide
tgggttgagtagagcaaggtt

SEQ ID NO: 34145 - RNA, 21 nt, synthetic construct
  source 1..21: mol_type = other RNA; note = Description of Artificial Sequence: Synthetic oligonucleotide
tagggttgagtagagcaagtt

SEQ ID NO: 34146 - RNA, 21 nt, synthetic construct
  source 1..21: mol_type = other RNA; note = Description of Artificial Sequence: Synthetic oligonucleotide
tcagggttgagtagagcaatt

SEQ ID NO: 34147 - RNA, 21 nt, synthetic construct
  source 1..21: mol_type = other RNA; note = Description of Artificial Sequence: Synthetic oligonucleotide
ttcagggttgagtagagcatt

SEQ ID NO: 34148 - RNA, 21 nt, synthetic construct
  source 1..21: mol_type = other RNA; note = Description of Artificial Sequence: Synthetic oligonucleotide
tgtcagggttgagtagagctt

SEQ ID NO: 34149 - RNA, 21 nt, synthetic construct
  source 1..21: mol_type = other RNA; note = Description of Artificial Sequence: Synthetic oligonucleotide
tggtcagggttgagtagagtt

SEQ ID NO: 34150 - RNA, 21 nt, synthetic construct
  source 1..21: mol_type = other RNA; note = Description of Artificial Sequence: Synthetic oligonucleotide
taggtcagggttgagtagatt

SEQ ID NO: 34151 - RNA, 21 nt, synthetic construct
  source 1..21: mol_type = other RNA; note = Description of Artificial Sequence: Synthetic oligonucleotide
tgaggtcagggttgagtagtt

SEQ ID NO: 34152 - RNA, 21 nt, synthetic construct
  source 1..21: mol_type = other RNA; note = Description of Artificial Sequence: Synthetic oligonucleotide
tagaggtcagggttgagtatt

SEQ ID NO: 34153 - RNA, 21 nt, synthetic construct
  source 1..21: mol_type = other RNA; note = Description of Artificial Sequence: Synthetic oligonucleotide
taagaggtcagggttgagttt

SEQ ID NO: 34154 - RNA, 21 nt, synthetic construct
  source 1..21: mol_type = other RNA; note = Description of Artificial Sequence: Synthetic oligonucleotide
tgaagaggtcagggttgagtt

SEQ ID NO: 34155 - RNA, 21 nt, synthetic construct
  source 1..21: mol_type = other RNA; note = Description of Artificial Sequence: Synthetic oligonucleotide
tagaagaggtcagggttgatt

SEQ ID NO: 34156 - RNA, 21 nt, synthetic construct
  source 1..21: mol_type = other RNA; note = Description of Artificial Sequence: Synthetic oligonucleotide
tgagaagaggtcagggttgtt

SEQ ID NO: 34157 - RNA, 21 nt, synthetic construct
  source 1..21: mol_type = other RNA; note = Description of Artificial Sequence: Synthetic oligonucleotide
tagagaagaggtcagggtttt

SEQ ID NO: 34158 - RNA, 21 nt, synthetic construct
  source 1..21: mol_type = other RNA; note = Description of Artificial Sequence: Synthetic oligonucleotide
tgagagaagaggtcagggttt

SEQ ID NO: 34159 - RNA, 21 nt, synthetic construct
  source 1..21: mol_type = other RNA; note = Description of Artificial Sequence: Synthetic oligonucleotide
tagagagaagaggtcagggtt

SEQ ID NO: 34160 - RNA, 21 nt, synthetic construct
  source 1..21: mol_type = other RNA; note = Description of Artificial Sequence: Synthetic oligonucleotide
tcagagagaagaggtcaggtt

SEQ ID NO: 34161 - RNA, 21 nt, synthetic construct
  source 1..21: mol_type = other RNA; note = Description of Artificial Sequence: Synthetic oligonucleotide
ttcagagagaagaggtcagtt

SEQ ID NO: 34162 - RNA, 21 nt, synthetic construct
  source 1..21: mol_type = other RNA; note = Description of Artificial Sequence: Synthetic oligonucleotide
tgtcagagagaagaggtcatt

SEQ ID NO: 34163 - RNA, 21 nt, synthetic construct
  source 1..21: mol_type = other RNA; note = Description of Artificial Sequence: Synthetic oligonucleotide
tagtcagagagaagaggtctt

SEQ ID NO: 34164 - RNA, 21 nt, synthetic construct
  source 1..21: mol_type = other RNA; note = Description of Artificial Sequence: Synthetic oligonucleotide
tgagtcagagagaagaggttt

SEQ ID NO: 34165 - RNA, 21 nt, synthetic construct
  source 1..21: mol_type = other RNA; note = Description of Artificial Sequence: Synthetic oligonucleotide
tagagtcagagagaagaggtt

SEQ ID NO: 34166 - RNA, 21 nt, synthetic construct
  source 1..21: mol_type = other RNA; note = Description of Artificial Sequence: Synthetic oligonucleotide
tgagagtcagagagaagagtt

SEQ ID NO: 34167 - RNA, 21 nt, synthetic construct
  source 1..21: mol_type = other RNA; note = Description of Artificial Sequence: Synthetic oligonucleotide
tcgagagtcagagagaagatt

SEQ ID NO: 34168 - RNA, 21 nt, synthetic construct
  source 1..21: mol_type = other RNA; note = Description of Artificial Sequence: Synthetic oligonucleotide
ttcgagagtcagagagaagtt

SEQ ID NO: 34169 - RNA, 21 nt, synthetic construct
  source 1..21: mol_type = other RNA; note = Description of Artificial Sequence: Synthetic oligonucleotide
tgtcgagagtcagagagaatt

SEQ ID NO: 34170 - RNA, 21 nt, synthetic construct
  source 1..21: mol_type = other RNA; note = Description of Artificial Sequence: Synthetic oligonucleotide
tagtcgagagtcagagagatt

SEQ ID NO: 34171 - RNA, 21 nt, synthetic construct
  source 1..21: mol_type = other RNA; note = Description of Artificial Sequence: Synthetic oligonucleotide
taagtcgagagtcagagagtt

SEQ ID NO: 34172 - RNA, 21 nt, synthetic construct
  source 1..21: mol_type = other RNA; note = Description of Artificial Sequence: Synthetic oligonucleotide
tcaagtcgagagtcagagatt

SEQ ID NO: 34173 - RNA, 21 nt, synthetic construct
  source 1..21: mol_type = other RNA; note = Description of Artificial Sequence: Synthetic oligonucleotide
tacaagtcgagagtcagagtt

SEQ ID NO: 34174 - RNA, 21 nt, synthetic construct
  source 1..21: mol_type = other RNA; note = Description of Artificial Sequence: Synthetic oligonucleotide
tcacaagtcgagagtcagatt

SEQ ID NO: 34175 - RNA, 21 nt, synthetic construct
  source 1..21: mol_type = other RNA; note = Description of Artificial Sequence: Synthetic oligonucleotide
tacacaagtcgagagtcagtt

SEQ ID NO: 34176 - RNA, 21 nt, synthetic construct
  source 1..21: mol_type = other RNA; note = Description of Artificial Sequence: Synthetic oligonucleotide
taacacaagtcgagagtcatt

SEQ ID NO: 34177 - RNA, 21 nt, synthetic construct
  source 1..21: mol_type = other RNA; note = Description of Artificial Sequence: Synthetic oligonucleotide
tgaacacaagtcgagagtctt

SEQ ID NO: 34178 - RNA, 21 nt, synthetic construct
  source 1..21: mol_type = other RNA; note = Description of Artificial Sequence: Synthetic oligonucleotide
tggaacacaagtcgagagttt

SEQ ID NO: 34179 - RNA, 21 nt, synthetic construct
  source 1..21: mol_type = other RNA; note = Description of Artificial Sequence: Synthetic oligonucleotide
tgggaacacaagtcgagagtt

SEQ ID NO: 34180 - RNA, 21 nt, synthetic construct
  source 1..21: mol_type = other RNA; note = Description of Artificial Sequence: Synthetic oligonucleotide
tggggaacacaagtcgagatt

SEQ ID NO: 34181 - RNA, 21 nt, synthetic construct
  source 1..21: mol_type = other RNA; note = Description of Artificial Sequence: Synthetic oligonucleotide
tcggggaacacaagtcgagtt

SEQ ID NO: 34182 - RNA, 21 nt, synthetic construct
  source 1..21: mol_type = other RNA; note = Description of Artificial Sequence: Synthetic oligonucleotide
tgcggggaacacaagtcgatt

SEQ ID NO: 34183 - RNA, 21 nt, synthetic construct
  source 1..21: mol_type = other RNA; note = Description of Artificial Sequence: Synthetic oligonucleotide
tagcggggaacacaagtcgtt

SEQ ID NO: 34184 - RNA, 21 nt, synthetic construct
  source 1..21: mol_type = other RNA; note = Description of Artificial Sequence: Synthetic oligonucleotide
tgagcggggaacacaagtctt

SEQ ID NO: 34185 - RNA, 21 nt, synthetic construct
  source 1..21: mol_type = other RNA; note = Description of Artificial Sequence: Synthetic oligonucleotide
tggagcggggaacacaagttt

SEQ ID NO: 34186 - RNA, 21 nt, synthetic construct
  source 1..21: mol_type = other RNA; note = Description of Artificial Sequence: Synthetic oligonucleotide
taggagcggggaacacaagtt

SEQ ID NO: 34187 - RNA, 21 nt, synthetic construct
  source 1..21: mol_type = other RNA; note = Description of Artificial Sequence: Synthetic oligonucleotide
tgaggagcggggaacacaatt

SEQ ID NO: 34188 - RNA, 21 nt, synthetic construct
  source 1..21: mol_type = other RNA; note = Description of Artificial Sequence: Synthetic oligonucleotide
tggaggagcggggaacacatt

SEQ ID NO: 34189 - RNA, 21 nt, synthetic construct
  source 1..21: mol_type = other RNA; note = Description of Artificial Sequence: Synthetic oligonucleotide
tgggaggagcggggaacactt

SEQ ID NO: 34190 - RNA, 21 nt, synthetic construct
  source 1..21: mol_type = other RNA; note = Description of Artificial Sequence: Synthetic oligonucleotide
tagggaggagcggggaacatt

SEQ ID NO: 34191 - RNA, 21 nt, synthetic construct
  source 1..21: mol_type = other RNA; note = Description of Artificial Sequence: Synthetic oligonucleotide
tcagggaggagcggggaactt

SEQ ID NO: 34192 - RNA, 21 nt, synthetic construct
  source 1..21: mol_type = other RNA; note = Description of Artificial Sequence: Synthetic oligonucleotide
ttcagggaggagcggggaatt

SEQ ID NO: 34193 - RNA, 21 nt, synthetic construct
  source 1..21: mol_type = other RNA; note = Description of Artificial Sequence: Synthetic oligonucleotide
tgtcagggaggagcggggatt

SEQ ID NO: 34194 - RNA, 21 nt, synthetic construct
  source 1..21: mol_type = other RNA; note = Description of Artificial Sequence: Synthetic oligonucleotide
tggtcagggaggagcggggtt

SEQ ID NO: 34195 - RNA, 21 nt, synthetic construct
  source 1..21: mol_type = other RNA; note = Description of Artificial Sequence: Synthetic oligonucleotide
taggtcagggaggagcgggtt

SEQ ID NO: 34196 - RNA, 21 nt, synthetic construct
  source 1..21: mol_type = other RNA; note = Description of Artificial Sequence: Synthetic oligonucleotide
taaggtcagggaggagcggtt

SEQ ID NO: 34197 - RNA, 21 nt, synthetic construct
  source 1..21: mol_type = other RNA; note = Description of Artificial Sequence: Synthetic oligonucleotide
tgaaggtcagggaggagcgtt

SEQ ID NO: 34198 - RNA, 21 nt, synthetic construct
  source 1..21: mol_type = other RNA; note = Description of Artificial Sequence: Synthetic oligonucleotide
tggaaggtcagggaggagctt

SEQ ID NO: 34199 - RNA, 21 nt, synthetic construct
  source 1..21: mol_type = other RNA; note = Description of Artificial Sequence: Synthetic oligonucleotide
taggaaggtcagggaggagtt

SEQ ID NO: 34200 - RNA, 21 nt, synthetic construct
  source 1..21: mol_type = other RNA; note = Description of Artificial Sequence: Synthetic oligonucleotide
tgaggaaggtcagggaggatt

SEQ ID NO: 34201 - RNA, 21 nt, synthetic construct
  source 1..21: mol_type = other RNA; note = Description of Artificial Sequence: Synthetic oligonucleotide
tggaggaaggtcagggaggtt

SEQ ID NO: 34202 - RNA, 21 nt, synthetic construct
  source 1..21: mol_type = other RNA; note = Description of Artificial Sequence: Synthetic oligonucleotide
tgggaggaaggtcagggagtt

SEQ ID NO: 34203 - RNA, 21 nt, synthetic construct
  source 1..21: mol_type = other RNA; note = Description of Artificial Sequence: Synthetic oligonucleotide
tggggaggaaggtcagggatt

SEQ ID NO: 34204 - RNA, 21 nt, synthetic construct
  source 1..21: mol_type = other RNA; note = Description of Artificial Sequence: Synthetic oligonucleotide
taggggaggaaggtcagggtt

SEQ ID NO: 34205 - RNA, 21 nt, synthetic construct
  source 1..21: mol_type = other RNA; note = Description of Artificial Sequence: Synthetic oligonucleotide
tgaggggaggaaggtcaggtt

SEQ ID NO: 34206 - RNA, 21 nt, synthetic construct
  source 1..21: mol_type = other RNA; note = Description of Artificial Sequence: Synthetic oligonucleotide
tggaggggaggaaggtcagtt

SEQ ID NO: 34207 - RNA, 21 nt, synthetic construct
  source 1..21: mol_type = other RNA; note = Description of Artificial Sequence: Synthetic oligonucleotide
tgggaggggaggaaggtcatt

SEQ ID NO: 34208 - RNA, 21 nt, synthetic construct
  source 1..21: mol_type = other RNA; note = Description of Artificial Sequence: Synthetic oligonucleotide
tggggaggggaggaaggtctt

SEQ ID NO: 34209 - RNA, 21 nt, synthetic construct
  source 1..21: mol_type = other RNA; note = Description of Artificial Sequence: Synthetic oligonucleotide
taggggaggggaggaaggttt

SEQ ID NO: 34210 - RNA, 21 nt, synthetic construct
  source 1..21: mol_type = other RNA; note = Description of Artificial Sequence: Synthetic oligonucleotide
taaggggaggggaggaaggtt

SEQ ID NO: 34211 - RNA, 21 nt, synthetic construct
  source 1..21: mol_type = other RNA; note = Description of Artificial Sequence: Synthetic oligonucleotide
taaaggggaggggaggaagtt

SEQ ID NO: 34212 - RNA, 21 nt, synthetic construct
  source 1..21: mol_type = other RNA; note = Description of Artificial Sequence: Synthetic oligonucleotide
tgaaaggggaggggaggaatt

SEQ ID NO: 34213 - RNA, 21 nt, synthetic construct
  source 1..21: mol_type = other RNA; note = Description of Artificial Sequence: Synthetic oligonucleotide
ttgaaaggggaggggaggatt

SEQ ID NO: 34214 - RNA, 21 nt, synthetic construct
  source 1..21: mol_type = other RNA; note = Description of Artificial Sequence: Synthetic oligonucleotide
tgtgaaaggggaggggaggtt

SEQ ID NO: 34215 - RNA, 21 nt, synthetic construct
  source 1..21: mol_type = other RNA; note = Description of Artificial Sequence: Synthetic oligonucleotide
tagtgaaaggggaggggagtt

SEQ ID NO: 34216 - RNA, 21 nt, synthetic construct
  source 1..21: mol_type = other RNA; note = Description of Artificial Sequence: Synthetic oligonucleotide
tgagtgaaaggggaggggatt

SEQ ID NO: 34217 - RNA, 21 nt, synthetic construct
  source 1..21: mol_type = other RNA; note = Description of Artificial Sequence: Synthetic oligonucleotide
ttgagtgaaaggggaggggtt

SEQ ID NO: 34218 - RNA, 21 nt, synthetic construct
  source 1..21: mol_type = other RNA; note = Description of Artificial Sequence: Synthetic oligonucleotide
tttgagtgaaaggggagggtt

SEQ ID NO: 34219 - RNA, 21 nt, synthetic construct
  source 1..21: mol_type = other RNA; note = Description of Artificial Sequence: Synthetic oligonucleotide
tattgagtgaaaggggaggtt

SEQ ID NO: 34220 - RNA, 21 nt, synthetic construct
  source 1..21: mol_type = other RNA; note = Description of Artificial Sequence: Synthetic oligonucleotide
taattgagtgaaaggggagtt

SEQ ID NO: 34221 - RNA, 21 nt, synthetic construct
  source 1..21: mol_type = other RNA; note = Description of Artificial Sequence: Synthetic oligonucleotide
tgaattgagtgaaaggggatt

SEQ ID NO: 34222 - RNA, 21 nt, synthetic construct
  source 1..21: mol_type = other RNA; note = Description of Artificial Sequence: Synthetic oligonucleotide
tagaattgagtgaaaggggtt

SEQ ID NO: 34223 - RNA, 21 nt, synthetic construct
  source 1..21: mol_type = other RNA; note = Description of Artificial Sequence: Synthetic oligonucleotide
tgagaattgagtgaaagggtt

SEQ ID NO: 34224 - RNA, 21 nt, synthetic construct
  source 1..21: mol_type = other RNA; note = Description of Artificial Sequence: Synthetic oligonucleotide
ttgagaattgagtgaaaggtt

SEQ ID NO: 34225 - RNA, 21 nt, synthetic construct
  source 1..21: mol_type = other RNA; note = Description of Artificial Sequence: Synthetic oligonucleotide
tgtgagaattgagtgaaagtt

SEQ ID NO: 34226 - RNA, 21 nt, synthetic construct
  source 1..21: mol_type = other RNA; note = Description of Artificial Sequence: Synthetic oligonucleotide
tggtgagaattgagtgaaatt

SEQ ID NO: 34227 - RNA, 21 nt, synthetic construct
  source 1..21: mol_type = other RNA; note = Description of Artificial Sequence: Synthetic oligonucleotide
ttggtgagaattgagtgaatt

SEQ ID NO: 34228 - RNA, 21 nt, synthetic construct
  source 1..21: mol_type = other RNA; note = Description of Artificial Sequence: Synthetic oligonucleotide
tttggtgagaattgagtgatt

SEQ ID NO: 34229 - RNA, 21 nt, synthetic construct
  source 1..21: mol_type = other RNA; note = Description of Artificial Sequence: Synthetic oligonucleotide
tgttggtgagaattgagtgtt

SEQ ID NO: 34230 - RNA, 21 nt, synthetic construct
  source 1..21: mol_type = other RNA; note = Description of Artificial Sequence: Synthetic oligonucleotide
tagttggtgagaattgagttt

SEQ ID NO: 34231 - RNA, 21 nt, synthetic construct
  source 1..21: mol_type = other RNA; note = Description of Artificial Sequence: Synthetic oligonucleotide
tgagttggtgagaattgagtt

SEQ ID NO: 34232 - RNA, 21 nt, synthetic construct
  source 1..21: mol_type = other RNA; note = Description of Artificial Sequence: Synthetic oligonucleotide
tagagttggtgagaattgatt

SEQ ID NO: 34233 - RNA, 21 nt, synthetic construct
  source 1..21: mol_type = other RNA; note = Description of Artificial Sequence: Synthetic oligonucleotide
taagagttggtgagaattgtt

SEQ ID NO: 34234 - RNA, 21 nt, synthetic construct
  source 1..21: mol_type = other RNA; note = Description of Artificial Sequence: Synthetic oligonucleotide
taaagagttggtgagaatttt

SEQ ID NO: 34235 - RNA, 21 nt, synthetic construct
  source 1..21: mol_type = other RNA; note = Description of Artificial Sequence: Synthetic oligonucleotide
tgaaagagttggtgagaattt

SEQ ID NO: 34236 - RNA, 21 nt, synthetic construct
  source 1..21: mol_type = other RNA; note = Description of Artificial Sequence: Synthetic oligonucleotide
tagaaagagttggtgagaatt

SEQ ID NO: 34237 - RNA, 21 nt, synthetic construct
  source 1..21: mol_type = other RNA; note = Description of Artificial Sequence: Synthetic oligonucleotide
tgagaaagagttggtgagatt

SEQ ID NO: 34238 - RNA, 21 nt, synthetic construct
  source 1..21: mol_type = other RNA; note = Description of Artificial Sequence: Synthetic oligonucleotide
tagagaaagagttggtgagtt

SEQ ID NO: 34239 - RNA, 21 nt, synthetic construct
  source 1..21: mol_type = other RNA; note = Description of Artificial Sequence: Synthetic oligonucleotide
tgagagaaagagttggtgatt

SEQ ID NO: 34240 - RNA, 21 nt, synthetic construct
  source 1..21: mol_type = other RNA; note = Description of Artificial Sequence: Synthetic oligonucleotide
tagagagaaagagttggtgtt

SEQ ID NO: 34241 - RNA, 21 nt, synthetic construct
  source 1..21: mol_type = other RNA; note = Description of Artificial Sequence: Synthetic oligonucleotide
tgagagagaaagagttggttt

SEQ ID NO: 34242 - RNA, 21 nt, synthetic construct
  source 1..21: mol_type = other RNA; note = Description of Artificial Sequence: Synthetic oligonucleotide
tagagagagaaagagttggtt

SEQ ID NO: 34243 - RNA, 21 nt, synthetic construct
  source 1..21: mol_type = other RNA; note = Description of Artificial Sequence: Synthetic oligonucleotide
tcagagagagaaagagttgtt

SEQ ID NO: 34244 - RNA, 21 nt, synthetic construct
  source 1..21: mol_type = other RNA; note = Description of Artificial Sequence: Synthetic oligonucleotide
tccagagagagaaagagtttt

SEQ ID NO: 34245 - RNA, 21 nt, synthetic construct
  source 1..21: mol_type = other RNA; note = Description of Artificial Sequence: Synthetic oligonucleotide
taccagagagagaaagagttt

SEQ ID NO: 34246 - RNA, 21 nt, synthetic construct
  source 1..21: mol_type = other RNA; note = Description of Artificial Sequence: Synthetic oligonucleotide
tcaccagagagagaaagagtt

SEQ ID NO: 34247 - RNA, 21 nt, synthetic construct
  source 1..21: mol_type = other RNA; note = Description of Artificial Sequence: Synthetic oligonucleotide
tacaccagagagagaaagatt

SEQ ID NO: 34248 - RNA, 21 nt, synthetic construct
  source 1..21: mol_type = other RNA; note = Description of Artificial Sequence: Synthetic oligonucleotide
taacaccagagagagaaagtt

SEQ ID NO: 34249 - RNA, 21 nt, synthetic construct
  source 1..21: mol_type = other RNA; note = Description of Artificial Sequence: Synthetic oligonucleotide
taaacaccagagagagaaatt

SEQ ID NO: 34250 - RNA, 21 nt, synthetic construct
  source 1..21: mol_type = other RNA; note = Description of Artificial Sequence: Synthetic oligonucleotide
taaaacaccagagagagaatt

SEQ ID NO: 34251 - RNA, 21 nt, synthetic construct
  source 1..21: mol_type = other RNA; note = Description of Artificial Sequence: Synthetic oligonucleotide
tgaaaacaccagagagagatt

SEQ ID NO: 34252 - RNA, 21 nt, synthetic construct
  source 1..21: mol_type = other RNA; note = Description of Artificial Sequence: Synthetic oligonucleotide
tagaaaacaccagagagagtt

SEQ ID NO: 34253 - RNA, 21 nt, synthetic construct
  source 1..21: mol_type = other RNA; note = Description of Artificial Sequence: Synthetic oligonucleotide
tgagaaaacaccagagagatt

SEQ ID NO: 34254 - RNA, 21 nt, synthetic construct
  source 1..21: mol_type = other RNA; note = Description of Artificial Sequence: Synthetic oligonucleotide
tggagaaaacaccagagagtt

SEQ ID NO: 34255 - RNA, 21 nt, synthetic construct
  source 1..21: mol_type = other RNA; note = Description of Artificial Sequence: Synthetic oligonucleotide
taggagaaaacaccagagatt

SEQ ID NO: 34256 - RNA, 21 nt, synthetic construct
  source 1..21: mol_type = other RNA; note = Description of Artificial Sequence: Synthetic oligonucleotide
taaggagaaaacaccagagtt

SEQ ID NO: 34257 - RNA, 21 nt, synthetic construct
  source 1..21: mol_type = other RNA; note = Description of Artificial Sequence: Synthetic oligonucleotide
taaaggagaaaacaccagatt

SEQ ID NO: 34258 - RNA, 21 nt, synthetic construct
  source 1..21: mol_type = other RNA; note = Description of Artificial Sequence: Synthetic oligonucleotide
taaaaggagaaaacaccagtt

SEQ ID NO: 34259 - RNA, 21 nt, synthetic construct
  source 1..21: mol_type = other RNA; note = Description of Artificial Sequence: Synthetic oligonucleotide
tgaaaaggagaaaacaccatt

SEQ ID NO: 34260 - RNA, 21 nt, synthetic construct
  source 1..21: mol_type = other RNA; note = Description of Artificial Sequence: Synthetic oligonucleotide
tagaaaaggagaaaacacctt

SEQ ID NO: 34261 - RNA, 21 nt, synthetic construct
  source 1..21: mol_type = other RNA; note = Description of Artificial Sequence: Synthetic oligonucleotide
tgagaaaaggagaaaacactt

SEQ ID NO: 34262 - RNA, 21 nt, synthetic construct
  source 1..21: mol_type = other RNA; note = Description of Artificial Sequence: Synthetic oligonucleotide
tcgagaaaaggagaaaacatt

SEQ ID NO: 34263 - RNA, 21 nt, synthetic construct
  source 1..21: mol_type = other RNA; note = Description of Artificial Sequence: Synthetic oligonucleotide
tacgagaaaaggagaaaactt

SEQ ID NO: 34264 - RNA, 21 nt, synthetic construct
  source 1..21: mol_type = other RNA; note = Description of Artificial Sequence: Synthetic oligonucleotide
ttacgagaaaaggagaaaatt

SEQ ID NO: 34265 - RNA, 21 nt, synthetic construct
  source 1..21: mol_type = other RNA; note = Description of Artificial Sequence: Synthetic oligonucleotide
tttacgagaaaaggagaaatt

SEQ ID NO: 34266 - RNA, 21 nt, synthetic construct
  source 1..21: mol_type = other RNA; note = Description of Artificial Sequence: Synthetic oligonucleotide
ttttacgagaaaaggagaatt

SEQ ID NO: 34267 - RNA, 21 nt, synthetic construct
  source 1..21: mol_type = other RNA; note = Description of Artificial Sequence: Synthetic oligonucleotide
tgtttacgagaaaaggagatt

SEQ ID NO: 34268 - RNA, 21 nt, synthetic construct
  source 1..21: mol_type = other RNA; note = Description of Artificial Sequence: Synthetic oligonucleotide
tagtttacgagaaaaggagtt

SEQ ID NO: 34269 - RNA, 21 nt, synthetic construct
  source 1..21: mol_type = other RNA; note = Description of Artificial Sequence: Synthetic oligonucleotide
taagtttacgagaaaaggatt

SEQ ID NO: 34270 - RNA, 21 nt, synthetic construct
  source 1..21: mol_type = other RNA; note = Description of Artificial Sequence: Synthetic oligonucleotide
taaagtttacgagaaaaggtt

SEQ ID NO: 34271 - RNA, 21 nt, synthetic construct
  source 1..21: mol_type = other RNA; note = Description of Artificial Sequence: Synthetic oligonucleotide
tcaaagtttacgagaaaagtt

SEQ ID NO: 34272 - RNA, 21 nt, synthetic construct
  source 1..21: mol_type = other RNA; note = Description of Artificial Sequence: Synthetic oligonucleotide
tgcaaagtttacgagaaaatt

SEQ ID NO: 34273 - RNA, 21 nt, synthetic construct
  source 1..21: mol_type = other RNA; note = Description of Artificial Sequence: Synthetic oligonucleotide
tggcaaagtttacgagaaatt

SEQ ID NO: 34274 - RNA, 21 nt, synthetic construct
  source 1..21: mol_type = other RNA; note = Description of Artificial Sequence: Synthetic oligonucleotide
tcggcaaagtttacgagaatt

SEQ ID NO: 34275 - RNA, 21 nt, synthetic construct
  source 1..21: mol_type = other RNA; note = Description of Artificial Sequence: Synthetic oligonucleotide
tgcggcaaagtttacgagatt

SEQ ID NO: 34276 - RNA, 21 nt, synthetic construct
  source 1..21: mol_type = other RNA; note = Description of Artificial Sequence: Synthetic oligonucleotide
tggcggcaaagtttacgagtt

SEQ ID NO: 34277 - RNA, 21 nt, synthetic construct
  source 1..21: mol_type = other RNA; note = Description of Artificial Sequence: Synthetic oligonucleotide
taggcggcaaagtttacgatt

SEQ ID NO: 34278 - RNA, 21 nt, synthetic construct
  source 1..21: mol_type = other RNA; note = Description of Artificial Sequence: Synthetic oligonucleotide
ttaggcggcaaagtttacgtt

SEQ ID NO: 34279 - RNA, 21 nt, synthetic construct
  source 1..21: mol_type = other RNA; note = Description of Artificial Sequence: Synthetic oligonucleotide
tataggcggcaaagtttactt

SEQ ID NO: 34280 - RNA, 21 nt, synthetic construct
  source 1..21: mol_type = other RNA; note = Description of Artificial Sequence: Synthetic oligonucleotide
tcataggcggcaaagtttatt

SEQ ID NO: 34281 - RNA, 21 nt, synthetic construct
  source 1..21: mol_type = other RNA; note = Description of Artificial Sequence: Synthetic oligonucleotide
ttcataggcggcaaagttttt

SEQ ID NO: 34282 - RNA, 21 nt, synthetic construct
  source 1..21: mol_type = other RNA; note = Description of Artificial Sequence: Synthetic oligonucleotide
tctcataggcggcaaagtttt

SEQ ID NO: 34283 - RNA, 21 nt, synthetic construct
  source 1..21: mol_type = other RNA; note = Description of Artificial Sequence: Synthetic oligonucleotide
tgctcataggcggcaaagttt

SEQ ID NO: 34284 - RNA, 21 nt, synthetic construct
  source 1..21: mol_type = other RNA; note = Description of Artificial Sequence: Synthetic oligonucleotide
ttgctcataggcggcaaagtt

SEQ ID NO: 34285 - RNA, 21 nt, synthetic construct
  source 1..21: mol_type = other RNA; note = Description of Artificial Sequence: Synthetic oligonucleotide
tctgctcataggcggcaaatt

SEQ ID NO: 34286 - RNA, 21 nt, synthetic construct
  source 1..21: mol_type = other RNA; note = Description of Artificial Sequence: Synthetic oligonucleotide
tgctgctcataggcggcaatt

SEQ ID NO: 34287 - RNA, 21 nt, synthetic construct
  source 1..21: mol_type = other RNA; note = Description of Artificial Sequence: Synthetic oligonucleotide
tggctgctcataggcggcatt

SEQ ID NO: 34288 - RNA, 21 nt, synthetic construct
  source 1..21: mol_type = other RNA; note = Description of Artificial Sequence: Synthetic oligonucleotide
ttggctgctcataggcggctt

SEQ ID NO: 34289 - RNA, 21 nt, synthetic construct
  source 1..21: mol_type = other RNA; note = Description of Artificial Sequence: Synthetic oligonucleotide
tgtggctgctcataggcggtt

SEQ ID NO: 34290 - RNA, 21 nt, synthetic construct
  source 1..21: mol_type = other RNA; note = Description of Artificial Sequence: Synthetic oligonucleotide
ttgtggctgctcataggcgtt

SEQ ID NO: 34291 - RNA, 21 nt, synthetic construct
  source 1..21: mol_type = other RNA; note = Description of Artificial Sequence: Synthetic oligonucleotide
tatgtggctgctcataggctt

SEQ ID NO: 34292 - RNA, 21 nt, synthetic construct
  source 1..21: mol_type = other RNA; note = Description of Artificial Sequence: Synthetic oligonucleotide
taatgtggctgctcataggtt

SEQ ID NO: 34293 - RNA, 21 nt, synthetic construct
  source 1..21: mol_type = other RNA; note = Description of Artificial Sequence: Synthetic oligonucleotide
tcaatgtggctgctcatagtt

SEQ ID NO: 34294 - RNA, 21 nt, synthetic construct
  source 1..21: mol_type = other RNA; note = Description of Artificial Sequence: Synthetic oligonucleotide
tgcaatgtggctgctcatatt

SEQ ID NO: 34295 - RNA, 21 nt, synthetic construct
  source 1..21: mol_type = other RNA; note = Description of Artificial Sequence: Synthetic oligonucleotide
tggcaatgtggctgctcattt

SEQ ID NO: 34296 - RNA, 21 nt, synthetic construct
  source 1..21: mol_type = other RNA; note = Description of Artificial Sequence: Synthetic oligonucleotide
taggcaatgtggctgctcatt

SEQ ID NO: 34297 - RNA, 21 nt, synthetic construct
  source 1..21: mol_type = other RNA; note = Description of Artificial Sequence: Synthetic oligonucleotide
taaggcaatgtggctgctctt

SEQ ID NO: 34298 - RNA, 21 nt, synthetic construct
  source 1..21: mol_type = other RNA; note = Description of Artificial Sequence: Synthetic oligonucleotide
ttaaggcaatgtggctgcttt

SEQ ID NO: 34299 - RNA, 21 nt, synthetic construct
  source 1..21: mol_type = other RNA; note = Description of Artificial Sequence: Synthetic oligonucleotide
tgtaaggcaatgtggctgctt

SEQ ID NO: 34300 - RNA, 21 nt, synthetic construct
  source 1..21: mol_type = other RNA; note = Description of Artificial Sequence: Synthetic oligonucleotide
tagtaaggcaatgtggctgtt

SEQ ID NO: 34301 - RNA, 21 nt, synthetic construct
  source 1..21: mol_type = other RNA; note = Description of Artificial Sequence: Synthetic oligonucleotide
tcagtaaggcaatgtggcttt

SEQ ID NO: 34302 - RNA, 21 nt, synthetic construct
  source 1..21: mol_type = other RNA; note = Description of Artificial Sequence: Synthetic oligonucleotide
tcaggggcgtggcgagggttt

SEQ ID NO: 34303 - RNA, 21 nt, synthetic construct
  source 1..21: mol_type = other RNA; note = Description of Artificial Sequence: Synthetic oligonucleotide
tgcaggggcgtggcgagggtt

SEQ ID NO: 34304 - RNA, 21 nt, synthetic construct
  source 1..21: mol_type = other RNA; note = Description of Artificial Sequence: Synthetic oligonucleotide
tagcaggggcgtggcgaggtt

SEQ ID NO: 34305 - RNA, 21 nt, synthetic construct
  source 1..21: mol_type = other RNA; note = Description of Artificial Sequence: Synthetic oligonucleotide
tgagcaggggcgtggcgagtt

SEQ ID NO: 34306 - RNA, 21 nt, synthetic construct
  source 1..21: mol_type = other RNA; note = Description of Artificial Sequence: Synthetic oligonucleotide
tggagcaggggcgtggcgatt

SEQ ID NO: 34307 - RNA, 21 nt, synthetic construct
  source 1..21: mol_type = other RNA; note = Description of Artificial Sequence: Synthetic oligonucleotide
tgggagcaggggcgtggcgtt

SEQ ID NO: 34308 - RNA, 21 nt, synthetic construct
  source 1..21: mol_type = other RNA; note = Description of Artificial Sequence: Synthetic oligonucleotide
tggggagcaggggcgtggctt

SEQ ID NO: 34309 - RNA, 21 nt, synthetic construct
  source 1..21: mol_type = other RNA; note = Description of Artificial Sequence: Synthetic oligonucleotide
tgggggagcaggggcgtggtt

SEQ ID NO: 34310 - RNA, 21 nt, synthetic construct
  source 1..21: mol_type = other RNA; note = Description of Artificial Sequence: Synthetic oligonucleotide
tcgggggagcaggggcgtgtt

SEQ ID NO: 34311 - RNA, 21 nt, synthetic construct
  source 1..21: mol_type = other RNA; note = Description of Artificial Sequence: Synthetic oligonucleotide
tgcgggggagcaggggcgttt

SEQ ID NO: 34312 - RNA, 21 nt, synthetic construct
  source 1..21: mol_type = other RNA; note = Description of Artificial Sequence: Synthetic oligonucleotide
tcgcgggggagcaggggcgtt

SEQ ID NO: 34313 - RNA, 21 nt, synthetic construct
  source 1..21: mol_type = other RNA; note = Description of Artificial Sequence: Synthetic oligonucleotide
tccgcgggggagcaggggctt

SEQ ID NO: 34314 - RNA, 21 nt, synthetic construct
  source 1..21: mol_type = other RNA; note = Description of Artificial Sequence: Synthetic oligonucleotide
taccgcgggggagcaggggtt

SEQ ID NO: 34315 - RNA, 21 nt, synthetic construct
  source 1..21: mol_type = other RNA; note = Description of Artificial Sequence: Synthetic oligonucleotide
taaccgcgggggagcagggtt

SEQ ID NO: 34316 - RNA, 21 nt, synthetic construct
  source 1..21: mol_type = other RNA; note = Description of Artificial Sequence: Synthetic oligonucleotide
tcaaccgcgggggagcaggtt

SEQ ID NO: 34317 - RNA, 21 nt, synthetic construct
  source 1..21: mol_type = other RNA; note = Description of Artificial Sequence: Synthetic oligonucleotide
tccaaccgcgggggagcagtt

SEQ ID NO: 34318 - RNA, 21 nt, synthetic construct
  source 1..21: mol_type = other RNA; note = Description of Artificial Sequence: Synthetic oligonucleotide
taccaaccgcgggggagcatt

SEQ ID NO: 34319 - RNA, 21 nt, synthetic construct
  source 1..21: mol_type = other RNA; note = Description of Artificial Sequence: Synthetic oligonucleotide
taaccaaccgcgggggagctt

SEQ ID NO: 34320 - RNA, 21 nt, synthetic construct
  source 1..21: mol_type = other RNA; note = Description of Artificial Sequence: Synthetic oligonucleotide
tgaaccaaccgcgggggagtt

SEQ ID NO: 34321 - RNA, 21 nt, synthetic construct
  source 1..21: mol_type = other RNA; note = Description of Artificial Sequence: Synthetic oligonucleotide
tagaaccaaccgcgggggatt

SEQ ID NO: 34322 - RNA, 21 nt, synthetic construct
  source 1..21: mol_type = other RNA; note = Description of Artificial Sequence: Synthetic oligonucleotide
taagaaccaaccgcgggggtt

SEQ ID NO: 34323 - RNA, 21 nt, synthetic construct
  source 1..21: mol_type = other RNA; note = Description of Artificial Sequence: Synthetic oligonucleotide
tgaagaaccaaccgcggggtt

SEQ ID NO: 34324 - RNA, 21 nt, synthetic construct
  source 1..21: mol_type = other RNA; note = Description of Artificial Sequence: Synthetic oligonucleotide
tggaagaaccaaccgcgggtt

SEQ ID NO: 34325 - RNA, 21 nt, synthetic construct
  source 1..21: mol_type = other RNA; note = Description of Artificial Sequence: Synthetic oligonucleotide
taggaagaaccaaccgcggtt

SEQ ID NO: 34326 - RNA, 21 nt, synthetic construct
  source 1..21: mol_type = other RNA; note = Description of Artificial Sequence: Synthetic oligonucleotide
taaggaagaaccaaccgcgtt

SEQ ID NO: 34327 - RNA, 21 nt, synthetic construct
  source 1..21: mol_type = other RNA; note = Description of Artificial Sequence: Synthetic oligonucleotide
tcaaggaagaaccaaccgctt

SEQ ID NO: 34328 - RNA, 21 nt, synthetic construct
  source 1..21: mol_type = other RNA; note = Description of Artificial Sequence: Synthetic oligonucleotide
tgcaaggaagaaccaaccgtt

SEQ ID NO: 34329 - RNA, 21 nt, synthetic construct
  source 1..21: mol_type = other RNA; note = Description of Artificial Sequence: Synthetic oligonucleotide
tagcaaggaagaaccaacctt

SEQ ID NO: 34330 - RNA, 21 nt, synthetic construct
  source 1..21: mol_type = other RNA; note = Description of Artificial Sequence: Synthetic oligonucleotide
tgagcaaggaagaaccaactt

SEQ ID NO: 34331 - RNA, 21 nt, synthetic construct
  source 1..21: mol_type = other RNA; note = Description of Artificial Sequence: Synthetic oligonucleotide
tagagcaaggaagaaccaatt

SEQ ID NO: 34332 - RNA, 21 nt, synthetic construct
  source 1..21: mol_type = other RNA; note = Description of Artificial Sequence: Synthetic oligonucleotide
ttagagcaaggaagaaccatt

SEQ ID NO: 34333 - RNA, 21 nt, synthetic construct
  source 1..21: mol_type = other RNA; note = Description of Artificial Sequence: Synthetic oligonucleotide
tgtagagcaaggaagaacctt

SEQ ID NO: 34334 - RNA, 21 nt, synthetic construct
  source 1..21: mol_type = other RNA; note = Description of Artificial Sequence: Synthetic oligonucleotide
tagtagagcaaggaagaactt

SEQ ID NO: 34335 - RNA, 21 nt, synthetic construct
  source 1..21: mol_type = other RNA; note = Description of Artificial Sequence: Synthetic oligonucleotide
tgagtagagcaaggaagaatt

SEQ ID NO: 34336 - RNA, 21 nt, synthetic construct
  source 1..21: mol_type = other RNA; note = Description of Artificial Sequence: Synthetic oligonucleotide
ttgagtagagcaaggaagatt

SEQ ID NO: 34337 - RNA, 21 nt, synthetic construct
  source 1..21: mol_type = other RNA; note = Description of Artificial Sequence: Synthetic oligonucleotide
tttgagtagagcaaggaagtt

SEQ ID NO: 34338 - RNA, 21 nt, synthetic construct
  source 1..21: mol_type = other RNA; note = Description of Artificial Sequence: Synthetic oligonucleotide
tgttgagtagagcaaggaatt

SEQ ID NO: 34339 - RNA, 21 nt, synthetic construct
  source 1..21: mol_type = other RNA; note = Description of Artificial Sequence: Synthetic oligonucleotide
tggttgagtagagcaaggatt

SEQ ID NO: 34340 - RNA, 21 nt, synthetic construct
  source 1..21: mol_type = other RNA; note = Description of Artificial Sequence: Synthetic oligonucleotide
tgggttgagtagagcaaggtt

SEQ ID NO: 34341 - RNA, 21 nt, synthetic construct
  source 1..21: mol_type = other RNA; note = Description of Artificial Sequence: Synthetic oligonucleotide
tagggttgagtagagcaagtt

SEQ ID NO: 34342 - RNA, 21 nt, synthetic construct
  source 1..21: mol_type = other RNA; note = Description of Artificial Sequence: Synthetic oligonucleotide
tcagggttgagtagagcaatt

SEQ ID NO: 34343 - RNA, 21 nt, synthetic construct
  source 1..21: mol_type = other RNA; note = Description of Artificial Sequence: Synthetic oligonucleotide
ttcagggttgagtagagcatt

SEQ ID NO: 34344 - RNA, 21 nt, synthetic construct
  source 1..21: mol_type = other RNA; note = Description of Artificial Sequence: Synthetic oligonucleotide
tgtcagggttgagtagagctt

SEQ ID NO: 34345 - RNA, 21 nt, synthetic construct
  source 1..21: mol_type = other RNA; note = Description of Artificial Sequence: Synthetic oligonucleotide
tggtcagggttgagtagagtt

SEQ ID NO: 34346 - RNA, 21 nt, synthetic construct
  source 1..21: mol_type = other RNA; note = Description of Artificial Sequence: Synthetic oligonucleotide
taggtcagggttgagtagatt

SEQ ID NO: 34347 - RNA, 21 nt, synthetic construct
  source 1..21: mol_type = other RNA; note = Description of Artificial Sequence: Synthetic oligonucleotide
tgaggtcagggttgagtagtt

SEQ ID NO: 34348 - RNA, 21 nt, synthetic construct
  source 1..21: mol_type = other RNA; note = Description of Artificial Sequence: Synthetic oligonucleotide
tagaggtcagggttgagtatt

SEQ ID NO: 34349 - RNA, 21 nt, synthetic construct
  source 1..21: mol_type = other RNA; note = Description of Artificial Sequence: Synthetic oligonucleotide
taagaggtcagggttgagttt

SEQ ID NO: 34350 - RNA, 21 nt, synthetic construct
  source 1..21: mol_type = other RNA; note = Description of Artificial Sequence: Synthetic oligonucleotide
tgaagaggtcagggttgagtt

SEQ ID NO: 34351 - RNA, 21 nt, synthetic construct
  source 1..21: mol_type = other RNA; note = Description of Artificial Sequence: Synthetic oligonucleotide
tagaagaggtcagggttgatt

SEQ ID NO: 34352 - RNA, 21 nt, synthetic construct
  source 1..21: mol_type = other RNA; note = Description of Artificial Sequence: Synthetic oligonucleotide
tgagaagaggtcagggttgtt

SEQ ID NO: 34353 - RNA, 21 nt, synthetic construct
  source 1..21: mol_type = other RNA; note = Description of Artificial Sequence: Synthetic oligonucleotide
tagagaagaggtcagggtttt

SEQ ID NO: 34354 - RNA, 21 nt, synthetic construct
  source 1..21: mol_type = other RNA; note = Description of Artificial Sequence: Synthetic oligonucleotide
tgagagaagaggtcagggttt

SEQ ID NO: 34355 - RNA, 21 nt, synthetic construct
  source 1..21: mol_type = other RNA; note = Description of Artificial Sequence: Synthetic oligonucleotide
tagagagaagaggtcagggtt

SEQ ID NO: 34356 - RNA, 21 nt, synthetic construct
  source 1..21: mol_type = other RNA; note = Description of Artificial Sequence: Synthetic oligonucleotide
tcagagagaagaggtcaggtt

SEQ ID NO: 34357 - RNA, 21 nt, synthetic construct
  source 1..21: mol_type = other RNA; note = Description of Artificial Sequence: Synthetic oligonucleotide
ttcagagagaagaggtcagtt

SEQ ID NO: 34358 - RNA, 21 nt, synthetic construct
  source 1..21: mol_type = other RNA; note = Description of Artificial Sequence: Synthetic oligonucleotide
tgtcagagagaagaggtcatt

SEQ ID NO: 34359 - RNA, 21 nt, synthetic construct
  source 1..21: mol_type = other RNA; note = Description of Artificial Sequence: Synthetic oligonucleotide
tagtcagagagaagaggtctt

SEQ ID NO: 34360 - RNA, 21 nt, synthetic construct
  source 1..21: mol_type = other RNA; note = Description of Artificial Sequence: Synthetic oligonucleotide
tgagtcagagagaagaggttt

SEQ ID NO: 34361 - RNA, 21 nt, synthetic construct
  source 1..21: mol_type = other RNA; note = Description of Artificial Sequence: Synthetic oligonucleotide
tagagtcagagagaagaggtt

SEQ ID NO: 34362 - RNA, 21 nt, synthetic construct
  source 1..21: mol_type = other RNA; note = Description of Artificial Sequence: Synthetic oligonucleotide
tgagagtcagagagaagagtt

SEQ ID NO: 34363 - RNA, 21 nt, synthetic construct
  source 1..21: mol_type = other RNA; note = Description of Artificial Sequence: Synthetic oligonucleotide
tcgagagtcagagagaagatt

SEQ ID NO: 34364 - RNA, 21 nt, synthetic construct
  source 1..21: mol_type = other RNA; note = Description of Artificial Sequence: Synthetic oligonucleotide
ttcgagagtcagagagaagtt

SEQ ID NO: 34365 - RNA, 21 nt, synthetic construct
  source 1..21: mol_type = other RNA; note = Description of Artificial Sequence: Synthetic oligonucleotide
tgtcgagagtcagagagaatt

SEQ ID NO: 34366 - RNA, 21 nt, synthetic construct
  source 1..21: mol_type = other RNA; note = Description of Artificial Sequence: Synthetic oligonucleotide
tagtcgagagtcagagagatt

SEQ ID NO: 34367 - RNA, 21 nt, synthetic construct
  source 1..21: mol_type = other RNA; note = Description of Artificial Sequence: Synthetic oligonucleotide
taagtcgagagtcagagagtt

SEQ ID NO: 34368 - RNA, 21 nt, synthetic construct
  source 1..21: mol_type = other RNA; note = Description of Artificial Sequence: Synthetic oligonucleotide
tcaagtcgagagtcagagatt

SEQ ID NO: 34369 - RNA, 21 nt, synthetic construct
  source 1..21: mol_type = other RNA; note = Description of Artificial Sequence: Synthetic oligonucleotide
tacaagtcgagagtcagagtt

SEQ ID NO: 34370 - RNA, 21 nt, synthetic construct
  source 1..21: mol_type = other RNA; note = Description of Artificial Sequence: Synthetic oligonucleotide
tcacaagtcgagagtcagatt

SEQ ID NO: 34371 - RNA, 21 nt, synthetic construct
  source 1..21: mol_type = other RNA; note = Description of Artificial Sequence: Synthetic oligonucleotide
tacacaagtcgagagtcagtt

SEQ ID NO: 34372 - RNA, 21 nt, synthetic construct
  source 1..21: mol_type = other RNA; note = Description of Artificial Sequence: Synthetic oligonucleotide
taacacaagtcgagagtcatt

SEQ ID NO: 34373 - RNA, 21 nt, synthetic construct
  source 1..21: mol_type = other RNA; note = Description of Artificial Sequence: Synthetic oligonucleotide
tgaacacaagtcgagagtctt

SEQ ID NO: 34374 - RNA, 21 nt, synthetic construct
  source 1..21: mol_type = other RNA; note = Description of Artificial Sequence: Synthetic oligonucleotide
tggaacacaagtcgagagttt

SEQ ID NO: 34375 - RNA, 21 nt, synthetic construct
  source 1..21: mol_type = other RNA; note = Description of Artificial Sequence: Synthetic oligonucleotide
tgggaacacaagtcgagagtt

SEQ ID NO: 34376 - RNA, 21 nt, synthetic construct
  source 1..21: mol_type = other RNA; note = Description of Artificial Sequence: Synthetic oligonucleotide
tggggaacacaagtcgagatt

SEQ ID NO: 34377 - RNA, 21 nt, synthetic construct
  source 1..21: mol_type = other RNA; note = Description of Artificial Sequence: Synthetic oligonucleotide
tcggggaacacaagtcgagtt

SEQ ID NO: 34378 - RNA, 21 nt, synthetic construct
  source 1..21: mol_type = other RNA; note = Description of Artificial Sequence: Synthetic oligonucleotide
tgcggggaacacaagtcgatt

SEQ ID NO: 34379 - RNA, 21 nt, synthetic construct
  source 1..21: mol_type = other RNA; note = Description of Artificial Sequence: Synthetic oligonucleotide
tagcggggaacacaagtcgtt

SEQ ID NO: 34380 - RNA, 21 nt, synthetic construct
  source 1..21: mol_type = other RNA; note = Description of Artificial Sequence: Synthetic oligonucleotide
tgagcggggaacacaagtctt

SEQ ID NO: 34381 - RNA, 21 nt, synthetic construct
  source 1..21: mol_type = other RNA; note = Description of Artificial Sequence: Synthetic oligonucleotide
tggagcggggaacacaagttt

SEQ ID NO: 34382 - RNA, 21 nt, synthetic construct
  source 1..21: mol_type = other RNA; note = Description of Artificial Sequence: Synthetic oligonucleotide
taggagcggggaacacaagtt

SEQ ID NO: 34383 - RNA, 21 nt, synthetic construct
  source 1..21: mol_type = other RNA; note = Description of Artificial Sequence: Synthetic oligonucleotide
tgaggagcggggaacacaatt

SEQ ID NO: 34384 - RNA, 21 nt, synthetic construct
  source 1..21: mol_type = other RNA; note = Description of Artificial Sequence: Synthetic oligonucleotide
tggaggagcggggaacacatt

SEQ ID NO: 34385 - RNA, 21 nt, synthetic construct
  source 1..21: mol_type = other RNA; note = Description of Artificial Sequence: Synthetic oligonucleotide
tgggaggagcggggaacactt

SEQ ID NO: 34386 - RNA, 21 nt, synthetic construct
  source 1..21: mol_type = other RNA; note = Description of Artificial Sequence: Synthetic oligonucleotide
tagggaggagcggggaacatt

SEQ ID NO: 34387 - RNA, 21 nt, synthetic construct
  source 1..21: mol_type = other RNA; note = Description of Artificial Sequence: Synthetic oligonucleotide
tcagggaggagcggggaactt

SEQ ID NO: 34388 - RNA, 21 nt, synthetic construct
  source 1..21: mol_type = other RNA; note = Description of Artificial Sequence: Synthetic oligonucleotide
ttcagggaggagcggggaatt

SEQ ID NO: 34389 - RNA, 21 nt, synthetic construct
  source 1..21: mol_type = other RNA; note = Description of Artificial Sequence: Synthetic oligonucleotide
tgtcagggaggagcggggatt

SEQ ID NO: 34390 - RNA, 21 nt, synthetic construct
  source 1..21: mol_type = other RNA; note = Description of Artificial Sequence: Synthetic oligonucleotide
tggtcagggaggagcggggtt

SEQ ID NO: 34391 - RNA, 21 nt, synthetic construct
  source 1..21: mol_type = other RNA; note = Description of Artificial Sequence: Synthetic oligonucleotide
taggtcagggaggagcgggtt

SEQ ID NO: 34392 - RNA, 21 nt, synthetic construct
  source 1..21: mol_type = other RNA; note = Description of Artificial Sequence: Synthetic oligonucleotide
taaggtcagggaggagcggtt

SEQ ID NO: 34393 - RNA, 21 nt, synthetic construct
  source 1..21: mol_type = other RNA; note = Description of Artificial Sequence: Synthetic oligonucleotide
tgaaggtcagggaggagcgtt

SEQ ID NO: 34394 - RNA, 21 nt, synthetic construct
  source 1..21: mol_type = other RNA; note = Description of Artificial Sequence: Synthetic oligonucleotide
tggaaggtcagggaggagctt

SEQ ID NO: 34395 - RNA, 21 nt, synthetic construct
  source 1..21: mol_type = other RNA; note = Description of Artificial Sequence: Synthetic oligonucleotide
taggaaggtcagggaggagtt

SEQ ID NO: 34396 - RNA, 21 nt, synthetic construct
  source 1..21: mol_type = other RNA; note = Description of Artificial Sequence: Synthetic oligonucleotide
tgaggaaggtcagggaggatt

SEQ ID NO: 34397 - RNA, 21 nt, synthetic construct
  source 1..21: mol_type = other RNA; note = Description of Artificial Sequence: Synthetic oligonucleotide
tggaggaaggtcagggaggtt

SEQ ID NO: 34398 - RNA, 21 nt, synthetic construct
  source 1..21: mol_type = other RNA; note = Description of Artificial Sequence: Synthetic oligonucleotide
tgggaggaaggtcagggagtt

SEQ ID NO: 34399 - RNA, 21 nt, synthetic construct
  source 1..21: mol_type = other RNA; note = Description of Artificial Sequence: Synthetic oligonucleotide
tggggaggaaggtcagggatt

SEQ ID NO: 34400 - RNA, 21 nt, synthetic construct
  source 1..21: mol_type = other RNA; note = Description of Artificial Sequence: Synthetic oligonucleotide
taggggaggaaggtcagggtt

SEQ ID NO: 34401 - RNA, 21 nt, synthetic construct
  source 1..21: mol_type = other RNA; note = Description of Artificial Sequence: Synthetic oligonucleotide
tgaggggaggaaggtcaggtt

SEQ ID NO: 34402 - RNA, 21 nt, synthetic construct
  source 1..21: mol_type = other RNA; note = Description of Artificial Sequence: Synthetic oligonucleotide
tggaggggaggaaggtcagtt

SEQ ID NO: 34403 - RNA, 21 nt, synthetic construct
  source 1..21: mol_type = other RNA; note = Description of Artificial Sequence: Synthetic oligonucleotide
tgggaggggaggaaggtcatt

SEQ ID NO: 34404 - RNA, 21 nt, synthetic construct
  source 1..21: mol_type = other RNA; note = Description of Artificial Sequence: Synthetic oligonucleotide
tggggaggggaggaaggtctt

SEQ ID NO: 34405 - RNA, 21 nt, synthetic construct
  source 1..21: mol_type = other RNA; note = Description of Artificial Sequence: Synthetic oligonucleotide
taggggaggggaggaaggttt

SEQ ID NO: 34406 - RNA, 21 nt, synthetic construct
  source 1..21: mol_type = other RNA; note = Description of Artificial Sequence: Synthetic oligonucleotide
taaggggaggggaggaaggtt

SEQ ID NO: 34407 - RNA, 21 nt, synthetic construct
  source 1..21: mol_type = other RNA; note = Description of Artificial Sequence: Synthetic oligonucleotide
taaaggggaggggaggaagtt

SEQ ID NO: 34408 - RNA, 21 nt, synthetic construct
  source 1..21: mol_type = other RNA; note = Description of Artificial Sequence: Synthetic oligonucleotide
tgaaaggggaggggaggaatt

SEQ ID NO: 34409 - RNA, 21 nt, synthetic construct
  source 1..21: mol_type = other RNA; note = Description of Artificial Sequence: Synthetic oligonucleotide
ttgaaaggggaggggaggatt

SEQ ID NO: 34410 - RNA, 21 nt, synthetic construct
  source 1..21: mol_type = other RNA; note = Description of Artificial Sequence: Synthetic oligonucleotide
tgtgaaaggggaggggaggtt

SEQ ID NO: 34411 - RNA, 21 nt, synthetic construct
  source 1..21: mol_type = other RNA; note = Description of Artificial Sequence: Synthetic oligonucleotide
tagtgaaaggggaggggagtt

SEQ ID NO: 34412 - RNA, 21 nt, synthetic construct
  source 1..21: mol_type = other RNA; note = Description of Artificial Sequence: Synthetic oligonucleotide
tgagtgaaaggggaggggatt

SEQ ID NO: 34413 - RNA, 21 nt, synthetic construct
  source 1..21: mol_type = other RNA; note = Description of Artificial Sequence: Synthetic oligonucleotide
ttgagtgaaaggggaggggtt

SEQ ID NO: 34414 - RNA, 21 nt, synthetic construct
  source 1..21: mol_type = other RNA; note = Description of Artificial Sequence: Synthetic oligonucleotide
tttgagtgaaaggggagggtt

SEQ ID NO: 34415 - RNA, 21 nt, synthetic construct
  source 1..21: mol_type = other RNA; note = Description of Artificial Sequence: Synthetic oligonucleotide
tattgagtgaaaggggaggtt

SEQ ID NO: 34416 - RNA, 21 nt, synthetic construct
  source 1..21: mol_type = other RNA; note = Description of Artificial Sequence: Synthetic oligonucleotide
taattgagtgaaaggggagtt

SEQ ID NO: 34417 - RNA, 21 nt, synthetic construct
  source 1..21: mol_type = other RNA; note = Description of Artificial Sequence: Synthetic oligonucleotide
tgaattgagtgaaaggggatt

SEQ ID NO: 34418 - RNA, 21 nt, synthetic construct
  source 1..21: mol_type = other RNA; note = Description of Artificial Sequence: Synthetic oligonucleotide
tagaattgagtgaaaggggtt

SEQ ID NO: 34419 - RNA, 21 nt, synthetic construct
  source 1..21: mol_type = other RNA; note = Description of Artificial Sequence: Synthetic oligonucleotide
tgagaattgagtgaaagggtt

SEQ ID NO: 34420 - RNA, 21 nt, synthetic construct
  source 1..21: mol_type = other RNA; note = Description of Artificial Sequence: Synthetic oligonucleotide
ttgagaattgagtgaaaggtt

SEQ ID NO: 34421 - RNA, 21 nt, synthetic construct
  source 1..21: mol_type = other RNA; note = Description of Artificial Sequence: Synthetic oligonucleotide
tgtgagaattgagtgaaagtt

SEQ ID NO: 34422 - RNA, 21 nt, synthetic construct
  source 1..21: mol_type = other RNA; note = Description of Artificial Sequence: Synthetic oligonucleotide
tggtgagaattgagtgaaatt

SEQ ID NO: 34423 - RNA, 21 nt, synthetic construct
  source 1..21: mol_type = other RNA; note = Description of Artificial Sequence: Synthetic oligonucleotide
ttggtgagaattgagtgaatt

SEQ ID NO: 34424 - RNA, 21 nt, synthetic construct
  source 1..21: mol_type = other RNA; note = Description of Artificial Sequence: Synthetic oligonucleotide
tttggtgagaattgagtgatt

SEQ ID NO: 34425 - RNA, 21 nt, synthetic construct
  source 1..21: mol_type = other RNA; note = Description of Artificial Sequence: Synthetic oligonucleotide
tgttggtgagaattgagtgtt

SEQ ID NO: 34426 - RNA, 21 nt, synthetic construct
  source 1..21: mol_type = other RNA; note = Description of Artificial Sequence: Synthetic oligonucleotide
tagttggtgagaattgagttt

SEQ ID NO: 34427 - RNA, 21 nt, synthetic construct
  source 1..21: mol_type = other RNA; note = Description of Artificial Sequence: Synthetic oligonucleotide
tgagttggtgagaattgagtt

SEQ ID NO: 34428 - RNA, 21 nt, synthetic construct
  source 1..21: mol_type = other RNA; note = Description of Artificial Sequence: Synthetic oligonucleotide
tagagttggtgagaattgatt

SEQ ID NO: 34429 - RNA, 21 nt, synthetic construct
  source 1..21: mol_type = other RNA; note = Description of Artificial Sequence: Synthetic oligonucleotide
taagagttggtgagaattgtt

SEQ ID NO: 34430 - RNA, 21 nt, synthetic construct
  source 1..21: mol_type = other RNA; note = Description of Artificial Sequence: Synthetic oligonucleotide
taaagagttggtgagaatttt

SEQ ID NO: 34431 - RNA, 21 nt, synthetic construct
  source 1..21: mol_type = other RNA; note = Description of Artificial Sequence: Synthetic oligonucleotide
tgaaagagttggtgagaattt

SEQ ID NO: 34432 - RNA, 21 nt, synthetic construct
  source 1..21: mol_type = other RNA; note = Description of Artificial Sequence: Synthetic oligonucleotide
tagaaagagttggtgagaatt

SEQ ID NO: 34433 - RNA, 21 nt, synthetic construct
  source 1..21: mol_type = other RNA; note = Description of Artificial Sequence: Synthetic oligonucleotide
tgagaaagagttggtgagatt

SEQ ID NO: 34434 - RNA, 21 nt, synthetic construct
  source 1..21: mol_type = other RNA; note = Description of Artificial Sequence: Synthetic oligonucleotide
tagagaaagagttggtgagtt

SEQ ID NO: 34435 - RNA, 21 nt, synthetic construct
  source 1..21: mol_type = other RNA; note = Description of Artificial Sequence: Synthetic oligonucleotide
tgagagaaagagttggtgatt

SEQ ID NO: 34436 - RNA, 21 nt, synthetic construct
  source 1..21: mol_type = other RNA; note = Description of Artificial Sequence: Synthetic oligonucleotide
tagagagaaagagttggtgtt

SEQ ID NO: 34437 - RNA, 21 nt, synthetic construct
  source 1..21: mol_type = other RNA; note = Description of Artificial Sequence: Synthetic oligonucleotide
tgagagagaaagagttggttt

SEQ ID NO: 34438 - RNA, 21 nt, synthetic construct
  source 1..21: mol_type = other RNA; note = Description of Artificial Sequence: Synthetic oligonucleotide
tagagagagaaagagttggtt

SEQ ID NO: 34439 - RNA, 21 nt, synthetic construct
  source 1..21: mol_type = other RNA; note = Description of Artificial Sequence: Synthetic oligonucleotide
tcagagagagaaagagttgtt

SEQ ID NO: 34440 - RNA, 21 nt, synthetic construct
  source 1..21: mol_type = other RNA; note = Description of Artificial Sequence: Synthetic oligonucleotide
tccagagagagaaagagtttt

SEQ ID NO: 34441 - RNA, 21 nt, synthetic construct
  source 1..21: mol_type = other RNA; note = Description of Artificial Sequence: Synthetic oligonucleotide
taccagagagagaaagagttt

SEQ ID NO: 34442 - RNA, 21 nt, synthetic construct
  source 1..21: mol_type = other RNA; note = Description of Artificial Sequence: Synthetic oligonucleotide
tcaccagagagagaaagagtt

SEQ ID NO: 34443 - RNA, 21 nt, synthetic construct
  source 1..21: mol_type = other RNA; note = Description of Artificial Sequence: Synthetic oligonucleotide
tacaccagagagagaaagatt

SEQ ID NO: 34444 - RNA, 21 nt, synthetic construct
  source 1..21: mol_type = other RNA; note = Description of Artificial Sequence: Synthetic oligonucleotide
taacaccagagagagaaagtt

SEQ ID NO: 34445 - RNA, 21 nt, synthetic construct
  source 1..21: mol_type = other RNA; note = Description of Artificial Sequence: Synthetic oligonucleotide
taaacaccagagagagaaatt

SEQ ID NO: 34446 - RNA, 21 nt, synthetic construct
  source 1..21: mol_type = other RNA; note = Description of Artificial Sequence: Synthetic oligonucleotide
taaaacaccagagagagaatt

SEQ ID NO: 34447 - RNA, 21 nt, synthetic construct
  source 1..21: mol_type = other RNA; note = Description of Artificial Sequence: Synthetic oligonucleotide
tgaaaacaccagagagagatt

SEQ ID NO: 34448 - RNA, 21 nt, synthetic construct
  source 1..21: mol_type = other RNA; note = Description of Artificial Sequence: Synthetic oligonucleotide
tagaaaacaccagagagagtt

SEQ ID NO: 34449 - RNA, 21 nt, synthetic construct
  source 1..21: mol_type = other RNA; note = Description of Artificial Sequence: Synthetic oligonucleotide
tgagaaaacaccagagagatt

SEQ ID NO: 34450 - RNA, 21 nt, synthetic construct
  source 1..21: mol_type = other RNA; note = Description of Artificial Sequence: Synthetic oligonucleotide
tggagaaaacaccagagagtt

SEQ ID NO: 34451 - RNA, 21 nt, synthetic construct
  source 1..21: mol_type = other RNA; note = Description of Artificial Sequence: Synthetic oligonucleotide
taggagaaaacaccagagatt

SEQ ID NO: 34452 - RNA, 21 nt, synthetic construct
  source 1..21: mol_type = other RNA; note = Description of Artificial Sequence: Synthetic oligonucleotide
taaggagaaaacaccagagtt

SEQ ID NO: 34453 - RNA, 21 nt, synthetic construct
  source 1..21: mol_type = other RNA; note = Description of Artificial Sequence: Synthetic oligonucleotide
taaaggagaaaacaccagatt

SEQ ID NO: 34454 - RNA, 21 nt, synthetic construct
  source 1..21: mol_type = other RNA; note = Description of Artificial Sequence: Synthetic oligonucleotide
taaaaggagaaaacaccagtt

SEQ ID NO: 34455 - RNA, 21 nt, synthetic construct
  source 1..21: mol_type = other RNA; note = Description of Artificial Sequence: Synthetic oligonucleotide
tgaaaaggagaaaacaccatt

SEQ ID NO: 34456 - RNA, 21 nt, synthetic construct
  source 1..21: mol_type = other RNA; note = Description of Artificial Sequence: Synthetic oligonucleotide
tagaaaaggagaaaacacctt

SEQ ID NO: 34457 - RNA, 21 nt, synthetic construct
  source 1..21: mol_type = other RNA; note = Description of Artificial Sequence: Synthetic oligonucleotide
tgagaaaaggagaaaacactt

SEQ ID NO: 34458 - RNA, 21 nt, synthetic construct
  source 1..21: mol_type = other RNA; note = Description of Artificial Sequence: Synthetic oligonucleotide
tcgagaaaaggagaaaacatt

SEQ ID NO: 34459 - RNA, 21 nt, synthetic construct
  source 1..21: mol_type = other RNA; note = Description of Artificial Sequence: Synthetic oligonucleotide
tacgagaaaaggagaaaactt

SEQ ID NO: 34460 - RNA, 21 nt, synthetic construct
  source 1..21: mol_type = other RNA; note = Description of Artificial Sequence: Synthetic oligonucleotide
ttacgagaaaaggagaaaatt

SEQ ID NO: 34461 - RNA, 21 nt, synthetic construct
  source 1..21: mol_type = other RNA; note = Description of Artificial Sequence: Synthetic oligonucleotide
tttacgagaaaaggagaaatt

SEQ ID NO: 34462 - RNA, 21 nt, synthetic construct
  source 1..21: mol_type = other RNA; note = Description of Artificial Sequence: Synthetic oligonucleotide
ttttacgagaaaaggagaatt

SEQ ID NO: 34463 - RNA, 21 nt, synthetic construct
  source 1..21: mol_type = other RNA; note = Description of Artificial Sequence: Synthetic oligonucleotide
tgtttacgagaaaaggagatt

SEQ ID NO: 34464 - RNA, 21 nt, synthetic construct
  source 1..21: mol_type = other RNA; note = Description of Artificial Sequence: Synthetic oligonucleotide
tagtttacgagaaaaggagtt

SEQ ID NO: 34465 - RNA, 21 nt, synthetic construct
  source 1..21: mol_type = other RNA; note = Description of Artificial Sequence: Synthetic oligonucleotide
taagtttacgagaaaaggatt

SEQ ID NO: 34466 - RNA, 21 nt, synthetic construct
  source 1..21: mol_type = other RNA; note = Description of Artificial Sequence: Synthetic oligonucleotide
taaagtttacgagaaaaggtt

SEQ ID NO: 34467 - RNA, 21 nt, synthetic construct
  source 1..21: mol_type = other RNA; note = Description of Artificial Sequence: Synthetic oligonucleotide
tcaaagtttacgagaaaagtt

SEQ ID NO: 34468 - RNA, 21 nt, synthetic construct
  source 1..21: mol_type = other RNA; note = Description of Artificial Sequence: Synthetic oligonucleotide
tgcaaagtttacgagaaaatt

SEQ ID NO: 34469 - RNA, 21 nt, synthetic construct
  source 1..21: mol_type = other RNA; note = Description of Artificial Sequence: Synthetic oligonucleotide
tggcaaagtttacgagaaatt

SEQ ID NO: 34470 - RNA, 21 nt, synthetic construct
  source 1..21: mol_type = other RNA; note = Description of Artificial Sequence: Synthetic oligonucleotide
tcggcaaagtttacgagaatt

SEQ ID NO: 34471 - RNA, 21 nt, synthetic construct
  source 1..21: mol_type = other RNA; note = Description of Artificial Sequence: Synthetic oligonucleotide
tgcggcaaagtttacgagatt

SEQ ID NO: 34472 - RNA, 21 nt, synthetic construct
  source 1..21: mol_type = other RNA; note = Description of Artificial Sequence: Synthetic oligonucleotide
tggcggcaaagtttacgagtt

SEQ ID NO: 34473 - RNA, 21 nt, synthetic construct
  source 1..21: mol_type = other RNA; note = Description of Artificial Sequence: Synthetic oligonucleotide
taggcggcaaagtttacgatt

SEQ ID NO: 34474 - RNA, 21 nt, synthetic construct
  source 1..21: mol_type = other RNA; note = Description of Artificial Sequence: Synthetic oligonucleotide
ttaggcggcaaagtttacgtt

SEQ ID NO: 34475 - RNA, 21 nt, synthetic construct
  source 1..21: mol_type = other RNA; note = Description of Artificial Sequence: Synthetic oligonucleotide
tataggcggcaaagtttactt

SEQ ID NO: 34476 - RNA, 21 nt, synthetic construct
  source 1..21: mol_type = other RNA; note = Description of Artificial Sequence: Synthetic oligonucleotide
tcataggcggcaaagtttatt

SEQ ID NO: 34477 - RNA, 21 nt, synthetic construct
  source 1..21: mol_type = other RNA; note = Description of Artificial Sequence: Synthetic oligonucleotide
ttcataggcggcaaagttttt

SEQ ID NO: 34478 - RNA, 21 nt, synthetic construct
  source 1..21: mol_type = other RNA; note = Description of Artificial Sequence: Synthetic oligonucleotide
tctcataggcggcaaagtttt

SEQ ID NO: 34479 - RNA, 21 nt, synthetic construct
  source 1..21: mol_type = other RNA; note = Description of Artificial Sequence: Synthetic oligonucleotide
tgctcataggcggcaaagttt

SEQ ID NO: 34480 - RNA, 21 nt, synthetic construct
  source 1..21: mol_type = other RNA; note = Description of Artificial Sequence: Synthetic oligonucleotide
ttgctcataggcggcaaagtt

SEQ ID NO: 34481 - RNA, 21 nt, synthetic construct
  source 1..21: mol_type = other RNA; note = Description of Artificial Sequence: Synthetic oligonucleotide
tctgctcataggcggcaaatt

SEQ ID NO: 34482 - RNA, 21 nt, synthetic construct
  source 1..21: mol_type = other RNA; note = Description of Artificial Sequence: Synthetic oligonucleotide
tgctgctcataggcggcaatt

SEQ ID NO: 34483 - RNA, 21 nt, synthetic construct
  source 1..21: mol_type = other RNA; note = Description of Artificial Sequence: Synthetic oligonucleotide
tggctgctcataggcggcatt

SEQ ID NO: 34484 - RNA, 21 nt, synthetic construct
  source 1..21: mol_type = other RNA; note = Description of Artificial Sequence: Synthetic oligonucleotide
ttggctgctcataggcggctt

SEQ ID NO: 34485 - RNA, 21 nt, synthetic construct
  source 1..21: mol_type = other RNA; note = Description of Artificial Sequence: Synthetic oligonucleotide
tgtggctgctcataggcggtt

SEQ ID NO: 34486 - RNA, 21 nt, synthetic construct
  source 1..21: mol_type = other RNA; note = Description of Artificial Sequence: Synthetic oligonucleotide
ttgtggctgctcataggcgtt

SEQ ID NO: 34487 - RNA, 21 nt, synthetic construct
  source 1..21: mol_type = other RNA; note = Description of Artificial Sequence: Synthetic oligonucleotide
tatgtggctgctcataggctt

SEQ ID NO: 34488 - RNA, 21 nt, synthetic construct
  source 1..21: mol_type = other RNA; note = Description of Artificial Sequence: Synthetic oligonucleotide
taatgtggctgctcataggtt

SEQ ID NO: 34489 - RNA, 21 nt, synthetic construct
  source 1..21: mol_type = other RNA; note = Description of Artificial Sequence: Synthetic oligonucleotide
tcaatgtggctgctcatagtt

SEQ ID NO: 34490 - RNA, 21 nt, synthetic construct
  source 1..21: mol_type = other RNA; note = Description of Artificial Sequence: Synthetic oligonucleotide
tgcaatgtggctgctcatatt

SEQ ID NO: 34491 - RNA, 21 nt, synthetic construct
  source 1..21: mol_type = other RNA; note = Description of Artificial Sequence: Synthetic oligonucleotide
tggcaatgtggctgctcattt

SEQ ID NO: 34492 - RNA, 21 nt, synthetic construct
  source 1..21: mol_type = other RNA; note = Description of Artificial Sequence: Synthetic oligonucleotide
taggcaatgtggctgctcatt

SEQ ID NO: 34493 - RNA, 21 nt, synthetic construct
  source 1..21: mol_type = other RNA; note = Description of Artificial Sequence: Synthetic oligonucleotide
taaggcaatgtggctgctctt

SEQ ID NO: 34494 - RNA, 21 nt, synthetic construct
  source 1..21: mol_type = other RNA; note = Description of Artificial Sequence: Synthetic oligonucleotide
ttaaggcaatgtggctgcttt

SEQ ID NO: 34495 - RNA, 21 nt, synthetic construct
  source 1..21: mol_type = other RNA; note = Description of Artificial Sequence: Synthetic oligonucleotide
tgtaaggcaatgtggctgctt

SEQ ID NO: 34496 - RNA, 21 nt, synthetic construct
  source 1..21: mol_type = other RNA; note = Description of Artificial Sequence: Synthetic oligonucleotide
tagtaaggcaatgtggctgtt

SEQ ID NO: 34497 - RNA, 21 nt, synthetic construct
  source 1..21: mol_type = other RNA; note = Description of Artificial Sequence: Synthetic oligonucleotide
tcagtaaggcaatgtggcttt

SEQ ID NO: 34498 - protein, 16 aa, synthetic construct
  source 1..16: note = Description of Artificial Sequence: Synthetic peptide
AAVALLPAVLLALLAP

SEQ ID NO: 34499 - protein, 11 aa, unidentified
  source 1..11: note = Description of Unknown: RFGF analogue sequence
AALLPVLLAAP

SEQ ID NO: 34500 - protein, 13 aa, Human immunodeficiency virus
GRKKRRQRRRPPQ

SEQ ID NO: 34501 - protein, 15 aa, Drosophila sp.
RQIKIWFQNRRMKWK
